(19) United States
(12) Patent Application Publication
(10) Pub. No.: US 2011/0081362 A1
(43) Pub. Date: Apr. 7, 2011

(54) TREATMENT OF CANCER

(75) Inventors: Stephen J. Elledge, Brookline, MA (US); Ji Luo, Allston, MA (US); Michael Schlabach, Newton, MA (US); Nicole Solimini, Quincy, MA (US)

(73) Assignee: THE BRIGHAM AND WOMEN'S HOSPITAL, INC., Boston, MA (US)

(21) Appl. No.: 12/865,564

(22) PCT Filed: Feb. 2, 2009
(86) PCT No.: PCT/US09/32808

§ 371 Date: Dec. 10, 2010

Related U.S. Application Data
(60) Provisional application No. 61/025,067, filed on Jan. 31, 2008.

(51) Int. Cl. A61K 39/395; A61K 31/7105; A61K 31/7088; A61K 38/06; A61K 31/4184; A61K 31/337; A61K 31/505; A61K 31/4985; C12Q 1/02; A61P 35/00

(52) U.S. Cl. 424/174.1; 514/44 A; 514/44 R; 514/19.3; 514/395; 514/449; 514/274; 514/249; 435/29

(57) ABSTRACT

Described herein are methods based, in part, on the discovery of genes or gene products that can be down-modulated to inhibit the growth and survival of a cell, such as a cancer cell. In one embodiment, the genes or gene targets are preferentially expressed in a cell having an activating Ras mutation (e.g., a cancer cell), which permits selective inhibition of growth in cells bearing an activating Ras mutation without affecting cells lacking enhanced Ras activity. In addition, the methods described herein provide for determining cancer prognosis in an individual bearing an activating Ras mutation.

### BACKGROUND OF THE INVENTION

[0001] Despite years of research into the development of new methods of treatment, many types of cancer, including, e.g., breast and colon cancer, remain quite common. There is a clear need for more anti-cancer agents to complement or replace existing treatments.

### SUMMARY OF THE INVENTION

[0002] The methods described herein are based, in part, on the discovery of genes or gene products that can be down-modulated to inhibit the growth and survival of a cell, such as a cancer cell. In one embodiment, the genes or gene targets are preferentially expressed in a cell having an activating Ras mutation (e.g., a cancer cell), which permits selective inhibition of growth in cells bearing an activating Ras mutation without affecting cells lacking enhanced Ras activity. In addition, the methods described herein provide for determining cancer prognosis in an individual bearing an activating Ras mutation.

[0003] In one aspect, the methods described herein are useful for inhibiting growth or survival of a cancer cell bearing a Ras mutation, the method comprising contacting a cancer cell bearing a Ras mutation with an inhibitor of at least one gene from Table 2, wherein the inhibitor reduces growth or survival of the cancer cell.

[0004] In one embodiment of this aspect and all other aspects described herein, the inhibitor disrupts mitosis in the cancer cell.

[0005] In another embodiment of this aspect and all other aspects described herein, the inhibitor is selected from the group consisting of an RNA interference molecule, a small molecule, an antibody, an aptamer and a nucleic acid.

[0006] In another embodiment of this aspect and all other aspects described herein, the method further comprises activation of APC/C activity.

[0007] In another embodiment of this aspect and all other aspects described herein, the contacting step comprises treating the cancer cell with an inhibitor of a plurality of the genes.

[0008] In another embodiment of this aspect and all other aspects described herein, the method further comprises contacting with a chemotherapeutic agent for combination therapy.

[0009] In another embodiment of this aspect and all other aspects described herein, the inhibitor targets a regulator of mitosis or chromosomal segregation.

[0010] In another embodiment of this aspect and all other aspects described herein, the cancer cell is in culture.

[0011] In another embodiment of this aspect and all other aspects described herein, the regulator is a gene product selected from the group consisting of cyclin A2 (CCNA2), hMIS18α, hMIS18β, C21ORF45, OIP5, borealin (CDCA89), KNL-1 (CASC5), MCAK (KIF2C), subunits of the APC/C complex (ANAPC1, ANAPC4, CDC16, CDC27), SMC4, and the mitotic kinase PLK-1.

[0012] In another embodiment of this aspect and all other aspects described herein, the inhibitor is a small molecule selected from the group consisting of paclitaxel, nocodazole, monastrol, and BI-2536.

[0013] In another embodiment of this aspect and all other aspects described herein, the inhibitor is selected from the group consisting of those listed in Table 7 or 8.

[0014] In another embodiment of this aspect and all other aspects described herein, the inhibitor targets a regulator of APC/C or proteasomes.

[0015] In another embodiment of this aspect and all other aspects described herein, the regulator is a gene product selected from the group consisting of APC1/ANAPC1, APC4/ANAPC4, Cdc16, Cdc27, PSMA5, PSMB5, and PSMB6.

[0016] In another embodiment of this aspect and all other aspects described herein, the inhibitor is selected from the group consisting of those listed in Table 7 or 8.

[0017] In another embodiment of this aspect and all other aspects described herein, the method further comprises activating EMI™, or EV15 activity.

[0018] In another embodiment of this aspect and all other aspects described herein, the method further comprises combination treatment of the individual with BI-2536.

[0019] In another embodiment of this aspect and all other aspects described herein, the inhibitor is MG132, or bortezomib.

[0020] Also described herein is a method for treating cancer in an individual, the method comprising: (a) determining whether cancer cells of the individual bear an activating Ras mutation; and, if so, (b) administering to the individual an inhibitor of at least one gene selected from Table 2, wherein the inhibitor treats cancer in the individual.

[0021] In one embodiment of this aspect and all other aspects described herein, the inhibitor is selected from the group consisting of an RNA interference molecule, a small molecule, an antibody, an aptamer and a nucleic acid.

[0022] In another embodiment of this aspect and all other aspects described herein, the method further comprises activation of APC/C activity.

[0023] In another embodiment of this aspect and all other aspects described herein, the cancer is breast cancer or colon cancer.

[0024] In another embodiment of this aspect and all other aspects described herein, the administering step further comprises administering an inhibitor of a plurality of the genes.

[0025] In another embodiment of this aspect and all other aspects described herein, the method further comprises combination therapy with another chemotherapeutic agent.

[0026] In another embodiment of this aspect and all other aspects described herein, the inhibitor targets a regulator of mitosis or chromosomal segregation.

[0027] In another embodiment of this aspect and all other aspects described herein, the regulator of mitosis or chromosomal segregation is a gene product selected from the group consisting of cyclin A2 (CCNA2), hMIS18a, hMIS1813, C21ORF45, OIP5, borealin (CDCA89), KNL-1 (CASC5), MCAK (KIF2C), subunits of the APC/C complex (ANAPC1, ANAPC4, CDC16, CDC27), SMC4, and the mitotic kinase PLK-1.

[0028] In another embodiment of this aspect and all other aspects described herein, the inhibitor is a small molecule selected from the group consisting of paclitaxel, nocodazole, monastrol, and BI-2536.

[0029] In another embodiment of this aspect and all other aspects described herein, the inhibitor targets a regulator of APC/C or proteasomes.

[0030] In another embodiment of this aspect and all other aspects described herein, the regulator of APC/C or proteasomes is a gene product selected from the group consisting of APC1/ANAPC1, APC4/ANAPC4, Cdc16, Cdc27, PSMA5, PSMB5, and PSMB6.

[0031] In another embodiment of this aspect and all other aspects described herein, the method further comprises activating EMI1, or EV15.

[0032] In another embodiment of this aspect and all other aspects described herein, the method further comprises combination treatment of the individual with BI-2536.

[0033] In another embodiment of this aspect and all other aspects described herein, the inhibitor is MG132, or bortezomib.

[0034] In another embodiment of this aspect and all other aspects described herein, the inhibitor is selected from the antibodies listed in Table 7. Alternatively, in another embodiment of this aspect and all other aspects described herein, the inhibitor is selected from the miRNA listed in Table 8.

[0035] Also described herein is a method for determining prognosis in an individual having an activating Ras mutation, the method comprising: (a) measuring the levels of COPS3, Cdc16, and EV15 in a test sample from an individual having an activating Ras mutation; and (b) comparing the levels of COPS3, Cdc16 and EV15 to the levels of COPS3, Cdc16, and EV15 in a reference sample, wherein a decreased level of COPS3, a decreased level of Cdc16 and an increased level of EV15 compared to the reference sample indicates a good prognosis, and wherein a larger degree of change indicates a more positive prognosis.

[0036] In one embodiment of this aspect and all other aspects described herein, the test sample is a biopsy sample.

[0037] In another embodiment of this aspect and all other aspects described herein, the reference sample is obtained from the same individual.

[0038] In another embodiment of this aspect and all other aspects described herein, the reference sample is obtained from the individual prior to onset of a detectable cancer.

[0039] In another embodiment of this aspect and all other aspects described herein, the reference sample is obtained from a non-cancerous tissue.

[0040] In another embodiment of this aspect and all other aspects described herein, the reference sample is obtained from a population of individuals.

[0041] Also described herein is a method for inhibiting growth or survival of a cell bearing an activating Ras mutation, the method comprising contacting a cancer cell with an inhibitor of at least one gene from Table 2, wherein the inhibitor inhibits growth or survival of the cancer cell.

[0042] In one embodiment of this aspect and all other aspects described herein, the gene is selected from the group consisting of ACVR1c, ANAPC4, BUB1, CAND1, CLDN1, COPS3, F8, FABP3, FBXO3, HGS, JAK1, KCNA3, LMTK3, MAP4K4, MAPK1, MYST3, PI4K2B, PKN1, PLK1, PPP1R10, PRKCB1, PTPRE, RAD51C, RAF1, RNF20, SENP1, SENP8, SP100, TDRD3, TERF1, TRIM54, UCKL1, and XPO1.

[0043] In another embodiment of this aspect and all other aspects described herein, the gene is selected from the group consisting of ANAPC4, COPS3, JAK1, PLK1, and XPO1.

[0044] In another embodiment of this aspect and all other aspects described herein, the cancer cell is in culture.

[0045] In another embodiment of this aspect and all other aspects described herein, the cancer cell is a colon cancer cell.

[0046] In another embodiment of this aspect and all other aspects described herein, the cancer cell is a breast cancer cell.

[0047] In another embodiment of this aspect and all other aspects described herein, the inhibitor is selected from the group consisting of an RNA interference molecule, a small molecule, an antibody, an aptamer and a nucleic acid.

[0048] In another embodiment of this aspect and all other aspects described herein, the contacting step further comprises treating with an inhibitor of a plurality of genes.

[0049] In another embodiment of this aspect and all other aspects described herein, the method further comprises combination therapy with another chemotherapeutic agent.

[0050] Also described herein is a method for treating cancer in an individual, the method comprising administering an inhibitor of at least one gene from Table 3, 4 or 5 to an individual having cancer, wherein the inhibitor treats cancer in the individual.

[0051] In another embodiment of this aspect and all other aspects described herein, the gene is selected from the group consisting of ACVR1C, ANAPC4, BUB1, CAND1, CLDN1, COPS3, F8, FABP3, FBXO3, HGS, JAK1, KCNA3, LMTK3, MAP4K4, MAPK1, MYST3, PI4K2B, PKN1, PLK1, PPP1R10, PRKCB1, PTPRE, RAD51C, RAF1, RNF20, SENP1, SENP8, SP100, TDRD3, TERF1, TRIM54, UCKL1, and XPO1.

[0052] In another embodiment of this aspect and all other aspects described herein, the gene is selected from the group consisting of ANAPC4, COPS3, JAK1, PLK1, and XPO1.

[0053] In another embodiment of this aspect and all other aspects described herein, the cancer is colon cancer.

[0054] In another embodiment of this aspect and all other aspects described herein, the cancer is breast cancer.

[0055] In another embodiment of this aspect and all other aspects described herein, the inhibitor is selected from the group consisting of an RNA interference molecule, a small molecule, an antibody, an aptamer and a nucleic acid.

[0056] In another embodiment of this aspect and all other aspects described herein, the administering step comprises administering an inhibitor to a plurality of genes.

[0057] In another embodiment of this aspect and all other aspects described herein, the method further comprises combination therapy with a chemotherapeutic agent.

### DEFINITIONS

[0058] As used herein, the terms “down-modulation” refers to reducing the function of a target gene. This can be accomplished by directly affecting the gene itself, (e.g., by reducing gene expression or protein synthesis), or alternatively by reducing target function/activity at the protein level. As such, an agent useful in the methods described herein is one that inhibits target gene expression or protein synthesis, or inhibits target protein function or activity.

[0059] As used herein, the term “inhibitor of at least one gene” is an agent that selectively “down-modulates” at least one desired target gene. An inhibitor can be any agent capable of down-modulating a target gene including, but not limited to, a small molecule, an antibody, an RNA interference molecule, an aptamer, or a nucleic acid. As used herein, the term “inhibitor” means an agent that down-modulates a measurable indicator of target gene expression and/or protein activity in cells by at least 5% compared to the expression or activity of the target gene in the absence of the agent. Preferably, an inhibitor down-modulates expression and/or activity of a target gene by at least 10%, at least 20%, at least 30%, at least 40%, at least 50%, at least 60%, at least 70%, at least 80%, at least 90%, at least 95%, at least 99%, or even 100% (i.e., absent) compared to expression and/or activity of a target gene in the absence of the agent. In certain aspects, the expression and/or activity of more than one gene is down-modulated, for example, 2 target genes, 3, 4, 5, 6, 7, 8, 9, 10, 20, 40, 50, or more genes.

[0060] As used herein, the term “activating Ras mutation” refers to any mutation in the Ras oncogene that results in enhanced activity of the Ras polypeptide as assessed by e.g., activation of one or more downstream pathways of Ras. By “enhanced activity” is meant an increase in Ras activity by at least 5% compared to a reference control. Three Ras genes have been identified in the mammalian genome (designated H-ras, K-ras, and N-ras), which acquire cancer cell transformation-inducing properties by single point mutations within their coding sequences. For example, a commonly detected activating Ras mutation found in human tumors is in codon 12 of the H-ras gene in which a base change from GGC to GTC results in a glycine-to-valine substitution in the GTPase regulatory domain of the Ras protein product. This single amino acid change is thought to abolish normal control of Ras protein function, thereby converting it from a normally regulated cellular protein to one that is constitutively active. This de-regulation of normal Ras protein function permits transformation of a cell from a state of normal growth to a state of malignant growth. Downstream effectors of Ras activation and the Ras pathway are further described by Karnoub and Wienberg et al. (2008) Nature: Molecular Cell Biology 9(7): 517-531, which is herein incorporated by reference in its entirety.

[0061] The term “RNAi” as used herein refers to interfering RNA or RNA interference. RNAi refers to a means of selective post-transcriptional gene silencing by destruction of specific mRNA by molecules that bind and inhibit the processing of mRNA, for example inhibit mRNA translation or result in mRNA degradation. As used herein, the term “RNAi” refers to any type of interfering RNA, including but are not limited to, siRNAi, shRNAi, endogenous microRNA and artificial microRNA. For instance, it includes sequences previously identified as siRNA, regardless of the mechanism of down-stream processing of the RNA (i.e. although siRNAs are believed to have a specific method of in vivo processing resulting in the cleavage of mRNA, such sequences can be incorporated into the vectors in the context of the flanking sequences described herein).

[0062] In one embodiment, the agent is an RNA interference molecule. The term “RNAi” and “RNA interfering” with respect to an agent of the invention, are used interchangeably herein. RNAi molecules are typically comprised of a sequence of nucleic acids or nucleic acid analogs, specific for a target gene. A nucleic acid sequence can be RNA or DNA, and can be single or double stranded, and can be selected from a group comprising; nucleic acid encoding a protein of interest, oligonucleotides, nucleic acid analogues, for example peptide-nucleic acid (PNA), pseudo-complementary PNA (pc-PNA), locked nucleic acid (LNA).

[0063] As used herein an “siRNA” refers to a nucleic acid that forms a double stranded RNA, which double stranded RNA has the ability to reduce or inhibit expression of a gene or target gene when the siRNA is present or expressed in the same cell as the target gene, for example an HDF gene. The double stranded RNA siRNA can be formed by the complementary strands. In one embodiment, a siRNA refers to a nucleic acid that can form a double stranded siRNA. The sequence of the siRNA can correspond to the full length target gene, or a subsequence thereof. Typically, the siRNA is at least about 15-50 nucleotides in length (e.g., each complementary sequence of the double stranded siRNA is about 15-50 nucleotides in length, and the double stranded siRNA is about 15-50 base pairs in length, preferably about 19-30 base nucleotides, preferably about 20-25 nucleotides in length, e.g., 20, 21, 22, 23, 24, 25, 26, 27, 28, 29, or 30 nucleotides in length). An siRNA can be chemically synthesized, it can be produced by in vitro transcription, or it can be produced within a cell specifically utilized for such production.

[0064] As used herein “shRNA” or “small hairpin RNA” (also called stem loop) is a type of siRNA. In one embodiment, these shRNAs are composed of a short, e.g. about 19 to about 25 nucleotide, antisense strand, followed by a nucleotide loop of about 5 to about 9 nucleotides, and the analogous sense strand. Alternatively, the sense strand can precede the nucleotide loop structure and the antisense strand can follow. shRNAs functions as RNAi and/or siRNA species but differs in that shRNA species are double stranded hairpin-like structure for increased stability. These shRNAs, as well as other such agents described herein, can be contained in plasmids, retroviruses, and lentiviruses and expressed from, for example, the pol III U6 promoter, or another promoter (see, e.g., Stewart, et al. (2003) RNA April; 9(4):493-501, incorporated by reference herein in its entirety).

[0065] The terms “microRNA” or “miRNA” are used interchangeably herein are endogenous RNAs, some of which are known to regulate the expression of protein-coding genes at the posttranscriptional level. Endogenous microRNA are small RNAs naturally present in the genome which are capable of modulating the productive utilization of mRNA. The term artificial microRNA includes any type of RNA sequence, other than endogenous microRNA, which is capable of modulating the productive utilization of mRNA. MicroRNA sequences have been described in publications such as Lim, et al., Genes & Development, 17, p. 991-1008 (2003), Lim et al Science 299, 1540 (2003), Lee and Ambros Science, 294, 862 (2001), Lau et al., Science 294, 858-861 (2001), Lagos-Quintana et al, Current Biology, 12, 735-739 (2002), Lagos Quintana et al, Science 294, 853-857 (2001), and Lagos-Quintana et al, RNA, 9, 175-179 (2003), which are incorporated by reference. Multiple microRNAs can also be incorporated into a precursor molecule. Furthermore, miRNA-like stem-loops can be expressed in cells as a vehicle to deliver artificial miRNAs and short interfering RNAs (siRNAs) for the purpose of modulating the expression of endogenous genes through the miRNA and or RNAi pathways.

[0066] As used herein, “double stranded RNA” or “dsRNA” refers to RNA molecules that are comprised of two strands. Double-stranded molecules include those comprised of a single RNA molecule that doubles back on itself to form a two-stranded structure. For example, the stem loop structure of the progenitor molecules from which the single-stranded miRNA is derived, called the pre-miRNA (Bartel et al. 2004. Cell 116:281-297), comprises a dsRNA molecule.

[0067] As used herein the term “comprising” or “comprises” is used in reference to compositions, methods, and respective component(s) thereof, that are essential to the invention, yet open to the inclusion of unspecified elements, whether essential or not.

[0068] As used herein the term “consisting essentially of” refers to those elements required for a given embodiment. The term permits the presence of elements that do not materially affect the basic and novel or functional characteristic(s) of that embodiment of the invention.

[0069] The term “consisting of” refers to compositions, methods, and respective components thereof as described herein, which are exclusive of any element not recited in that description of the embodiment.

[0070] As used in this specification and the appended claims, the singular forms “a,” “an,” and “the” include plural references unless the context clearly dictates otherwise. Thus for example, references to “the method” includes one or more methods, and/or steps of the type described herein and/or which will become apparent to those persons skilled in the art upon reading this disclosure and so forth.

### BRIEF DESCRIPTION OF THE FIGURES

[0071] FIG. 1. Overview of the pool-based dropout screen with barcode microarrays.

[0072] A. Schematic of library construction and screening protocol.

[0073] B. Schematic of the HH barcode hybridization.

[0074] C. Comparison between HH Amplicons (top) and full-hairpin PCR amplicons (bottom) on an HH probe microarray.

[0075] FIG. 2. Pool-based dropout screen for genes required for cancer cell viability.

[0076] A. Overview of shRNA pool behavior in the screen. For each cell line, shRNAs were ranked on the basis of their mean normalized log₂ Cy3/Cy5 ratios. The shaded rectangle indicates the log₂ ratio range within which an shRNA's abundance was considered unchanged.

[0077] B. Clustering of the four cell lines with the anti-proliferative shRNAs identified in the screen. The shaded scale represents mean normalized log₂ Cy3/Cy5 ratios of the probes.

[0078] C. Anti-proliferative shRNAs and genes that scored in the screen for each cell line are shown.

[0079] D. Summary of the common shRNAs and genes identified in the screen. Overlapping anti-proliferative shRNAs/genes between pairwise combinations of cell lines are displayed (DLKD-1 and HMEC have more overlapping genes than shRNAs because, in some cases, different sets of shRNAs targeting the same gene scored in each line).

[0080] FIG. 3. Genes commonly required for proliferation or survival of normal and cancer cells.

[0081] A. Representative candidate shRNAs that reduce viability of all four cell lines. Multiple entries for the same gene indicate that multiple independent shRNAs have scored in the screen for that gene. For each shRNA, the normalized log₂ Cy3/Cy5 ratio (i.e., its relative abundance in the end sample versus initial sample) is given.

[0082] B. Examples of core cellular modules required in all four cell lines. Shown are the APC/C (top left), the COP9 signalosome (top right), the eIF3 translation initiation complex (bottom left), and E3 ubiquitin ligases (bottom right).

[0083] C. Validation of selected shRNAs from the screen that reduce viability of all four cell lines. Candidate shRNAs were individually packaged into viruses and infected into cells in 96-well in independent triplicates. Cell viability was measured at day 9 after infection. All viability reductions were significant (P<0.05), except where indicated by the number sign. FF, negative control shRNA targeting firefly luciferase.

[0084] FIG. 4. Genes selectively required for proliferation or survival of cancer cells.

[0085] A. Identification of PPP1R12A (one shRNA) and PRPS2 (two shRNAs) as two genes that are selectively required by HCC1954 or DLD-1 cells respectively, in the screen.

[0086] B. and C. Validation of PPP1R12A (B) and PRPS2 (C) as selectively required for viability of HCC1954 or DLD-1 cells, respectively. Cells were either infected with individual retroviral shRNAs or transfected with individual siRNAs in triplicates. Cell viability was measured at 9 days after infection (shRNA) or 4 days after transfection (siRNA) (*, P<0.05). Luc, negative control siRNA targeting luciferase. PLK1, positive control siRNA targeting polo-like kinase 1.

[0087] D. Normalized log₂ ratios of an MDM2 shRNA in the screen.

[0088] E. shRNA knockdown of MDM2 selectively impairs the viability of HMECs. Cell viability was measured 9 days after infection with retroviruses expressing five different MDM2 shRNAs (* P<0.05).

[0089] F. Differential sensitivity of the four cell lines to the MDM2 inhibitor nutlin-3. Cell viability is reflective of their p53 status (HMECs and HCT116 cells, p53 wild-type; HCC1954 and DLD-1 cells, p53 mutant). Cell viability was measured after 4 days of nutlin-3 treatment (*, P<0.05). ctrl, control.

[0090] G. Normalized log₂ ratios of a BUB1 shRNA from the screen.

[0091] H. Enhanced sensitivity of HCC1954 cells to BUB1 knockdown. Both shRNA (left) and siRNA (right) knockdown of BUB1 reduce HCC1954 cell viability but have no effect on HMEC viability. Cell viability was measured 4 or 9 days after transfection or infection, respectively (* P<0.05).

[0092] FIG. 5. Quality assessment of the half-hairpin hybridization methodology.

[0093] A. Genomic DNA from library-infected HCT116 cells was independently amplified by PCR twice to recover the HHs. The two PCR products were labeled with Cy3 and Cy5 dyes, respectively, and hybridized competitively to a HH microarray. The raw Cy3 and Cy5 signals were plotted for each probe.

[0094] B. Cy5 signal intensities of microarray spots for HH PCR products for 3 separate pools of infected cells. Negative control probes are in gray, experimental HH probes are in black. Probes were ranked based on their mean signal intensity and error bars represent standard deviations across triplicates. The line indicates the cutoff at 2-fold above the mean signal of background probes.

[0095] C. HH PCR products from sub-pool 1.1 plasmids (4,223 shRNAs) were hybridized to a microarray containing probes to sub-pools 1.1, 1.2 and 1.3 (12,852 probes). The percentage of probes in the indicated range of signal intensity for sub-pools 1.1 (specific hybridization) and sub-pool 1.3 (cross-hybridization) are shown.

[0096] D. Genomic DNA from cells infected with three sub-pools (1.1, 1.2 and 1.3) of shRNA were mixed at different ratios (1:3:8 or 1:1:1) and equal amounts of total DNA were PCR amplified, labeled separately with Cy3 and Cy5, respectively, and hybridized to a single microarray containing HH probes against all 3 sub-pools. A scatter plot is displayed with each sub-pool in a different shade to illustrate the separation of signals. The input DNA ratio for each sub-pool is indicated.

[0097] E. Quantification of data in D, with probes in each sub-pool binned by signal intensity and plotted for mean log₂ Cy3/Cy5 ratio. Error bars indicate standard deviations.

[0098] FIG. 6. Verification of protein knockdown by shRNAs and siRNAs.

[0099] A. Western blots of RBX1 protein knockdown in the 4 human cell lines by RBX1 shRNAs (4 days post-infection) as indicated in FIG. 3C. Protein levels were quantified by first normalizing to loading control (tubulin) and then calculated as a percentage of negative control shRNA (FF, a hairpin targeting firefly luciferase).

[0100] B. Western blots of PPP1R12A protein knockdown in DLD-1 and HCC1954 cells by PPP1R12A shRNAs (4 days post-infection) and siRNAs (3 days post-transfection) as indicated in FIG. 4B (Luc, siRNA duplex targeting luciferase).

[0101] C. Western blots of PRPS2 protein knockdown in DLD-1 and HCC1954 cells by PRPS2 shRNAs (4 days post-infection) as indicated in FIG. 4C.

[0102] D. Top, Western blots of MDM2 protein knockdown in HCC1954 cells and HMECs by MDM2 shRNAs (4 days post-infection) as indicated in FIG. 4E. Bottom, MDM2 and p21 induction in response to nutlin-3 (2 days post treatment) as indicated in FIG. 4F.

[0103] E. Western blots of BUB1 protein knockdown in HCC1954 cells and HMECs by BUB1 shRNAs and siRNAs as indicated in FIG. 4H.

[0104] FIG. 7. A large-scale pool-based shRNA screen in mouse ES cells.

[0105] A. Mean log₂ Cy3/Cy5 ratios for all informative probes in the screen.

[0106] B. Representative candidate shRNAs that reduce ES cell viability. For each shRNA, the normalized log₂ ratio is given. Multiple entries for the same gene name indicate multiple independent shRNAs have scored in the screen for that gene. Error bars represent standard deviation across triplicates.

[0107] C. Functional classification (based on GO category) of the identified candidate proliferation genes for ES cells by either biological processes (left) or molecular functions (right).

[0108] FIG. 8. Scheme of the Ras synthetic lethal screen.

[0109] A. Schematic of the primary screen. Change in a particular shRNA's abundance in the pool over time is tracked by competitive hybridization between the initial sample (PD 0) and the final sample (PD 17). A low Cy3/Cy5 ratio indicates the dropout of an anti-proliferative or cytotoxic shRNA from the pool. Synthetic lethal shRNAs are identified as those that selectively drop out from the Ras Mut cells but not Ras WT cells. PD, population doubling; HH, half-hairpin.

[0110] B. MAPK pathway activity in DLD-1 cells. Phosphorylation on p42/p44 Erk kinases in cells that were either in full media, serum starved overnight, or serum-starved and then stimulated with full media.

[0111] C. Growth curve of DLD-1 cells in culture.

[0112] D. Anchorage independence growth of DLD-1 cells in soft-agarose. Colony formation was assessed 2 weeks after seeding.

[0113] E. Schematic of the competition assay used to validate shRNAs from the primary screen. Ras Mut cells expressing GFP and Ras WT cells were mixed and co-infected with the same retroviral shRNA. The Mut to WT cell ratio at the end of the experiment is measured by FACS. The percentage of Ras Mut cells in the mixture infected with a candidate RSL shRNA was normalized against that of a control shRNA targeting firefly luciferase (FF) within the same experiment to generate a normalized fitness score for the Ras Mut cells. Variations of this assay are also used to test the effect of siRNAs and chemical inhibitors.

[0114] FIG. 9. Functional diversity of candidate RSL genes.

[0115] A. Functional classification of candidate RSL genes based on biological processes as annotated in PANTHER. The P-value denotes selective enrichment for hits in the particular biological process.

[0116] B. Validation of candidate RSL genes with multiple shRNAs using the competition assay. FF, negative control shRNA targeting firefly luciferase (for each shRNA p<0.01 compares to the respective FF control, except * p<0.05). Error bars indicate standard deviations in all figures unless otherwise indicated.

[0117] FIG. 10. Hypersensitivity of Ras Mut cells to mitotic stress.

[0118] A. Examples of mitotic genes with multiple shRNAs showing synthetic lethality with mutant Ras (for each shRNA p<0.01 compares to respective FF control, except * p<0.05 and # not significant).

[0119] B. Mitotic index in asynchronous DLD-1 cells growing in log-phase (* p<0.05).

[0120] C. Ras Mut DLD-1 cells show higher frequency of abnormal anaphase as measured by cells with lagging chromosome 40 minutes after released from metaphase block by the Eg5 kinesin inhibitor monastrol (* p<0.05). An example of Ras Mut cell in anaphase with lagging chromosome (arrowhead) is shown.

[0121] D. The microtubule stabilizer paclitaxel selectively decreases the fitness of Ras Mut cells in a dose dependent fashion. The competition assay was carried out in the presence of paclitaxel for 5 days (* p<0.05,** p<0.01 compared to untreated samples).

[0122] E. Paclitaxel preferentially induces the G2 and mitotic accumulation of Ras Mut DLD-1 cells as assessed by FACS using DNA and phospho-H3 Ser10 staining, respectively (** p<0.01).

[0123] F. Paclitaxel causes strong prometaphase arrest in mitotic DLD-1 Ra Mut cells (shown are mean values of independent triplicates).

[0124] FIG. 11. Hypersensitivity of Ras Mut cells to PLK1 inhibition.

[0125] A. PLK1 knockdown by shRNA leads to enhanced toxicity in Ras Mut cells (for each shRNA p<0.01 compares to respective FF control, except * p<0.05).

[0126] B. The PLK1 inhibitor BI-2536 selectively decreases the fitness of Ras Mut cells in a dose-dependent fashion. The competition assay was carried out in the presence of BI-2536 for 5 days (* p<0.05,** p<0.01 compared to untreated samples).

[0127] C. Effect of synthetic lethal concentrations of BI-2536 on cell cycle distribution of Ras Mut and Ras WT DLD-1 cells after 26 hours of treatment. Cell cycle profiles shown are representative of 3 experiments.

[0128] D. BI-2536 causes strong prometaphase arrest in mitotic DLD-1 Ras Mut cells (shown are mean values of independent triplicates).

[0129] E. BI-2536 does not differentially affect mitotic entry in DLD-1 Ras Mut and WT cells. Cells synchronized at the G2/M boundary by the CDK1 inhibitor RO-3306 were released into nocodazole (100 ng/ml) together with indicated concentrations of BI-2536 for 1 hour. Mitotic index was measured as the percentage of cells staining positive for phospho-H3 Ser10.

[0130] F. BI-2536 differentially affect mitotic progression in DLD-1 Ras Mut and WT cells. Mitotic cells collected by nocodazole shake-off were released into indicated concentrations of BI-2536 for 2 hours. Mitotic index was measured as the percentage of cells staining positive for phospho-H3 Ser 10 (* p<0.05,** p<0.01 compared to samples without BI-2536 treatment).

[0131] G. Effect of BI-2536 (25 nM) on cell cycle distribution of DLD-1 Ras Mut and WT cells over a 48-hour period (* p<0.05, ** p<0.01).

[0132] FIG. 12. Ras Mut cells are hypersensitive to APC/C and proteasome inhibition.

[0133] A. Multiple shRNAs against the APC/C subunits APC1 and APC4 confer synthetic lethality in Ras Mut cells as measured by the competition assay (for each shRNA p<0.05 compares to respective FF control, except # not significant).

[0134] B. Over expression of the APC/C inhibitor EMI1 and its binding protein EVI5 selectively impair the viability of Ras Mut cells days (* p<0.05 compared to uninfected samples).

[0135] C. siRNA mediated knockdown of APC/C subunits synergizes with low concentration of BI-2536 to selectively impaired the viability of DLD-1 Ras Mut cells as measured by the competition assay. Cells were transfected with pools of 4 siRNAs against each gene, 2 days post transfection cells were treated with 10 nM of BI-2536 for 3 days before analysis by FACS (* p<0.05 compared to untransfected samples in the sample treatment group).

[0136] D. shRNAs targeting various proteasome subunits exhibit synthetic lethality in Ras Mut cells as measured by the competition assay (for each shRNA p<0.05 compares to respective FF control, except # not significant).

[0137] E. The proteasome inhibitors MG132 and bortezomib selectively decreased the fitness of DLD-1 Ras Mut cells in a dose dependent fashion. The competition assay was carried out in the presence of the drug for 4 days (* p<0.05,**p<0.01 compared to untreated samples).

[0138] F. MG132 and bortezomib preferentially induced the accumulation of Ras Mut DLD-1 cells as assessed by FACS using staining (** p<0.01 compared to samples without drug treatment).

[0139] G. BI-MG132 and bortezomib cause strong prometaphase arrest in mitotic DLD-1 Ras Mut cells (shown are mean values of independent triplicates).

[0140] FIG. 13. A potential model of mitotic regulation by Ras.

[0141] Without wishing to be bound by theory, the findings presented herein support a model that oncogenic Ras introduces mitotic stress by interfering with kinetochore and APC/C function.

[0142] FIG. 14. Candidate RSL genes associated with prognosis in human lung adenocarcinomas showing activation of the Ras pathway.

[0143] A. A gene expression signature for lung cancers with activated Ras pathway. A previously-derived gene expression signature (766 genes) of KRAS mutant versus wild-type lung tumors was used as a probe in an additional set of expression profiles from 442 human lung adenomcarcinomas. Both tumors with significant (P<0.01) similarity and tumors with dissimilarity to the KRAS signature (“Ras signature +” and “Ras signature −” tumors, respectively) were considered for subsequent survival analyses.

[0144] B. RSL pathway genes that correlate with prognosis among “Ras signature+” tumors. The expression of two candidate RSL genes, COPS3 and CDC16, are inversely correlated with better survival whereas the expression of EVI5 correlates with better survival (P<0.05). Within each of the two tumor subsets considered (“Ras signature +” and “Ras signature −”), tumors with expression levels for the given gene greater than the median were compared to the rest of the tumors in the subset, using Kaplan-Meier analysis.

[0145] C. Prognosis in “Ras signature +” and “Ras signature −” tumors using combined information from COPS3, CDC16, and EVI5. For each of the three genes, “+” and “−” is relative to their median expression across the subset of tumors. Within each of the two tumor subsets, three tumor groups were compared by Kaplan-Meier analysis: tumors with high CDC16, high COPS3, and low EVI5 (“CDC16+ COPS3+EVI−”); tumors with low CDC16, low COPS3, and high EVI5 (“CDC16−COPS3−EVI+”); and tumors not falling into these two groups (“other”). Log-rank P-values indicate significant differences among any of the three groups.

[0146] FIG. 15. Effect of K-Ras knockdown in DLD-1 and HCT116 cells.

[0147] A. DLD-1 Ras Mut cell fitness is modestly decreased by K-Ras shRNAs as measured by the competition assay (**p<0.01 compares to respective FF control).

[0148] B. Effect of K-Ras shRNAs on cell proliferation, colony formation on adherent surface and colony formation in soft agarose in DLD-1 and HCT116 Ras Mut cells. For the proliferation assay, equal number of cells stably expressing either K-Ras shRNAs or a control firefly luciferase (FF) shRNA were seeded at normal density and cell numbers were estimated 4 days later using ClelTiter-GLO assay. For adherent colony formation, cells were seeded at low density on adherent surface and colonies were counted 10 days later. For anchorage independent colony formation, cells were seeded at low density in soft agarose media and colonies were counted 3 week later (p<0.01 for all shRNAs compares to respective FF control).

[0149] C. Representative images of the colony assays in B for K-Ras shRNA1 in DLD-1 cells.

[0150] D. K-Ras protein knockdown in cell lines stably expressing K-Ras shRNAs were verified by Western blotting. Numbers under the blot indicate normalized levels of K-Ras proteins after adjusting for loading.

[0151] E. Effect of the MEK inhibitor U0126 and the PI3K inhibitor LY294002 on the fitness of DLD-1 Ras Mut cells in the competition assay. The assay was carried out for 5 days in the presence of various drug concentrations as indicated.

[0152] FIG. 16. Knockdown of COPS4 impair DLD-1 Ras Mut cell viability.

[0153] A. Effect of COPS4 shRNAs on cell proliferation, colony formation on adherent surface and colony formation in soft agarose in DLD-1 Ras Mut cells (p<0.05 for all shRNAs compared to respective FF control, except # not significant).

[0154] B. Representative images of the colony assays in B for K-Ras shRNA1 in DLD-1 cells.

[0155] C. Knockdown efficiency of COPS4 shRNAs in DLD-1 cells.

[0156] FIG. 17. Sensitivity of Ras Mut cells to nocodazole and paclitaxel.

[0157] A. Nocodazole shows no synthetic lethality with mutant Ras. The relative fitness of DLD-1 and HCT116 Ras Mut cells at various concentrations of Nocodazole was measured by the competition assay.

[0158] B. DLD-1 Ras Mut cells are hypersensitive to paclitaxel-induced cell cycle arrest.

[0159] FIG. 18. Hypersensitivity of Ras Mut cells to PLK1 inhibition.

[0160] A. PLK1 knockdown by siRNA leads to enhanced toxicity in DLD-1 Ras Mut cells. Luc, negative control siRNA targeting firefly luciferase (p<0.01 for all siRNAs compared to respective Luc siRNA control).

[0161] B. BI-2536 shows enhanced toxicity in DLD-1 Ras Mut cells as measured by CellTiter GLO cell viability assay (** p<0.01).

[0162] C. Representative image of DLD-1 cells treated with 50 nM BI-2536 for 24 hours. Mitotic cells at various stages were identified based on phospho-H3 Ser10 (pH3S10) staining, chromosome morphology (DAPI staining) and mitotic spindle arrangement (tubulin staining). Arrowhead indicates cell with a metaphase plate on bipolar spindle. Whereas a significant number of metaphase Ras WT cells still show fully aligned chromosomes under this condition, few metaphase Ras Mut cells are found to have fully aligned chromosomes.

[0163] D. BI-2536 does not differentially affect mitotic entry in DLD-1 Ras Mut and WT cells. Cell synchronization and release scheme is shown on top. Cells synchronized at the G2/M boundary by the CDK1 inhibitor RO-3306 were released into nocodazole (100 ng/ml) together with indicated concentrations of BI-2536 for 1 hour. Mitotic index was measured as the percentage of cells staining positive for phospho-H3 Ser10 (pH3S10).

[0164] E. BI-2536 differentially affects mitotic progression in DLD-1 Ras Mut and WT cells. Cell synchronization and release scheme is shown on top. Mitotic cells collected by nocodazole shake-off were released into indicated concentrations of BI-2536 for 2 hours. Mitotic index was measured as the percentage of cells staining positive for phospho-H3 Ser10.

[0165] F. Effect of BI-2536 (25 nM) on cell cycle distribution of Ras Mut and Ras WT DLD-1 cells over a 48-hour period.

[0166] G. PLK1 protein level and activation (as assessed by T210 phosphorylation) in Ras Mut and WT DLD-1 cells. Numbers below each blot indicates normalized signal intensity after an adjustment for loading. Asyn, asynchronous population; S (TT), S phase population arrested by double thymidine block; M (Noc) and M (BI), M phase population collected by releasing from double thymidine block into nocodazole (200 ng/ml) and BI-2536 (100 nM), respectively; G2/M (RO), G2/M population collected by releasing from double thymidine block into the CDK1 inhibitor RO-3306 (10 uM). Each inhibitor is used at concentrations that cause complete cell cycle arrest as verified by FACS.

[0167] FIG. 19. Hypersensitivity of HCT116 Ras Mut cells to proteasome inhibition.

[0168] A. The proteasome inhibitors MG132 and bortezomib selectively decrease the fitness of HCT116 Ras Mut cells. The competition assay was carried out in the presence of drug for 4 days (p<0.01 compared to untreated samples).

[0169] B. MG132 and bortezomib preferentially induce the accumulation of Ras Mut HCT116 cells as assessed by FACS using staining (p<0.05 compared to untreated samples).

[0170] FIG. 20. Synthetic lethal effect of mitotic inhibitors when applied as a transient treatment.

[0171] The effect of transient treatment with BI-2536, paclitaxel, bortezomib and MG132 on the fitness of DLD-1 Ras Mut cells was measured using competition assay. Cells were treated for a 24 hour period with drugs at the indicated concentrations. Drugs were then washed out and cells were allowed to proliferate for 3 additional days before FACS analysis.

[0172] FIG. 21. Lack of synthetic lethality of various mitotic inhibitors with the PI3K oncogene.

[0173] A. The effect of BI-2536, paclitaxel, bortezomib and MG132 on the fitness of DLD-1 PI3K Mut cells vs. PI3K WT cells as measured by the competition assay.

[0174] B. The effect of BI-2536, paclitaxel, bortezomib and MG132 on the fitness of HCT116 PI3K Mut cells vs. PI3K WT cells as measured by the competition assay.

[0175] Table 1. Candidate Ras synthetic lethal shRNAs and genes

[0176] Table 2. Validated Ras synthetic lethal shRNA and genes

[0177] Table 3. shRNAs that selectively impaired the viability of DLD-1 cells and not HMECs

[0178] Table 4. shRNAs that selectively impaired the viability of HCT116 cells and not HMECs

[0179] Table 5. shRNAs that selectively impaired the viability of HCC1954 cells and not HMECs

[0180] Table 6. Short list of exemplary gene targets

[0181] Table 7. Exemplary antibody inhibitors and exemplary epitope sequences

[0182] Table 8. Exemplary miRNA sequences

[0183] Table 9. Sequence information of shRNAs used in the screen.

### DETAILED DESCRIPTION OF THE INVENTION

[0184] The present invention relates to the treatment of cancer, for example, breast and colon cancer. A method based on RNA-interference was developed and experiments were carried out to identify cellular genes whose function is required for cancer cells but not normal cells. The protein products of these genes represent ideal drug targets for the treatment of cancer because inhibitors against these proteins would selectively impair the viability of cancer cells but not that of normal cells.

[0185] The target genes or gene products described herein serve as effective targets for treatment of cancer. In one embodiment, the method involves down-modulating one or more target genes or inhibiting one or more target gene products. Down-modulation can be achieved by contacting a cell with an agent that down-modulates the target gene. The agent can be formulated to enhance specific uptake or delivery to the interior of the cell as required.

### Ras Oncogene

[0186] The Ras family of small GTPases are frequently mutated in human cancers and are among the most studied oncogenes (Karnoub and Weinberg, 2008). Ras is a membrane-bound signaling molecule that cycles between the inactive, GDP-bound state and the active, GTP-bound state. Growth factor receptor signaling promotes GTP loading and activation of Ras, which in turn activates an array of downstream pathways to promote cell proliferation and survival. Among the major Ras effector pathways are the MAP kinase pathway (Zhang et al., 1993; Warne et al., 1993; Vojtek et al., 1993; Moodie et al., 1993), the PI 3-kinase (PI3K) pathway (Rodriguez-Viciana et al., 1994; Rodriguez-Viciana et al., 1997), RalGDS proteins (Spaargaren and Bischoff, 1994; Kikuchi et al., 1994; Hofer et al., 1994; Chien and White, 2003), phospholipase-Cε (Kelley et al., 2001; Song et al., 2001; Lopez et al., 2001) and Rac (Kelley et al., 2001; Song et al., 2001; Lopez et al., 2001), each of these has been implicated in mediating the tumorigenic effect of the Ras oncogene. Ras GAPs (GTPase activating proteins) inactivate Ras by stimulating its GTP hydrolysis (Bernards and Settleman, 2004). Oncogenic mutations in Ras are invariably point mutations that either interfere with Ras GAP binding to Ras or directly disrupts Ras GTPase activity, and therefore lock Ras in a constitutively active, GTP-bound state. Oncogenic mutations have been found in all three members of the Ras gene family, KRAS, HRAS and NRAS, with KRAS being the most frequently mutated member. KRAS mutations are found at high frequencies in pancreatic, thyroid, colon, lung, liver cancers and in myelodyspastic syndrome (Karnoub and Weinberg, 2008) and are correlated with poor prognosis (Andreyev et al., 2001; Mascaux et al., 2005).

[0187] Oncogenic H-, K-, and N-Ras arise from point mutations limited to a small number of sites (amino acids 12, 13, 59 and 61). Unlike normal Ras, oncogenic ras proteins lack intrinsic GTPase activity and hence remain constitutively activated (Trahey, M., and McCormick, F. (1987) Science 238: 542-5; Tabin, C. J, et al, (1982) Nature, 300: 143-9; Taparowsky, E. et al. (1982) Nature. 300; 762-5). The participation of oncogenic ras in human cancers is estimated to be 30% (Almoguera, C. et al (1988) Cell. 53:549-54),

[0188] Mutations are frequently limited to only one of the ras genes, and the frequency is tissue- and tumor type-specific. K-ras is the most commonly mutated oncogene in human cancers, especially the codon-12 mutation. While oncogenic activation of H-, K-, and N-Ras arising from single nucleotide substitutions has been observed in 30% of human cancers (Bos, J. L. (1989) Cancer Res 49, 4682-9), over 90% of human pancreatic cancer manifest the codon 12 K-ras mutation (Almoguera, C. et al, (1988) Cell 53, 549-54; Smit, V. T, et al. (1988) Nucleic Acids Res 16, 7773-82; Bos, J. L., (1989) Cancer Res 49, 4682-9). Pancreatic ductal adenocarcinoma, the most common cancer of the pancreas, has a rapid onset and is often resistant to treatment. The high frequency of K-ras mutations in human pancreatic tumors indicates that constitutive Ras activation plays a critical role during pancreatic oncogenesis. Adenocarcinoma of the exocrine pancreas represents the fourth-leading cause of cancer-related mortality in Western countries, Treatment has had limited success and the five-year survival remains less than 5% with a mean survival of 4 months for patients with surgically unresectable tumors (Jernal, A et al (2002) CA Cancer J 52, 23-47; Burris, E1, A. 3rd et. al, (1997) J Clin Oncol 15, 2403-13). This point mutation can be identified early in the course of the disease when normal cuboidal pancreatic ductal epithelium progresses to a flat hyperplastic lesion, and is considered causative in the pathogenesis of pancreatic cancer (Hruban, R. H. et al (2000) Clin Cancer Res 6, 2969-72; Tada, M. et al. (1996) Gastroenterology 110, 227-31).

[0189] K-ras mutations are present in 50% of the cancers of colon and lung (Bos, J. L. et al. (1987) Nature. 327: 293-7; Rodenhuis, S. et al. (1988) Cancer Res. 48: 5738-41). In cancers of the urinary tract and bladder, mutations are primarily in the H-ras gene (Fujita, J. et al. (1984) Nature. 309: 464-6; Visvanathan, K. V. et al. (1988) Oncogene Res. 3: 77-86). N-ras gene mutations are present in 30% of leukemia and liver cancer. Approximately 25% of skin lesions in humans involve mutations of the Fla-Ras (25% for squamous cell carcinoma and 28% for melanomas) (Bos, J. L. (1989) Cancer Res. 49:4683-9; Migley, R. S. and Kerr, D. J. (2002) Crit Rev Oncol Hematol. 44:109-20).50-60% of thyroid carcinomas are unique in having mutations in all three genes (Adjei, A. A, (2001) J Nati Cancer Inst. 93: 1062-74).

[0190] Constitutive activation of Ras can be achieved through oncogenic mutations or via hyper-activated growth factor receptors such as the EGFRs. Elevated expression and/or amplification of the members of the EGFR family, especially the EGFR and HER2, have been implicated in various forms of human malignancies (as reviewed in Prenzel, N. et al. (2001) Endocr Relat Cancer. 8:11-31). In some of these cancers (including pancreas, colon, bladder, lung), EGFR1HER2 overexpression is compounded by the presence of oncogenic Ras mutations. Abnormal activation of these receptors in tumors can be attributed to overexpression, gene amplification, constitutive activation mutations or autocrine growth factor loops (Voldborg, B. R. et al. (1997) Ann Oncol. 8:1197-206). For growth factor receptors, especially the EGFRs, amplification or/and overexpression of these receptors frequently occur in the cancers of the breast, ovary, stomach, esophagus, pancreatic, lung, colon neuroblastoma.

### Gene Down-Modulation

[0191] Gene down-modulation can be achieved by inhibition of protein expression (e.g., transcription, translation, post-translational processing) or protein function. Any composition known to inhibit or down-modulate one or more of the target genes disclosed herein can be used for down-modulation.

[0192] An example of a down-modulatory agent of the present invention is gene silencing of the target gene, such as with an RNAi molecule (e.g., siRNA, shRNA, miRNA, etc.). This entails a decrease in the mRNA level in a cell for a target gene by at least about 5%, about 10%, about 20%, about 30%, about 40%, about 50%, about 60%, about 70%, about 80%, about 90%, about 95%, about 99%, about 100% of the mRNA level found in the cell without the presence of the RNAi. In one preferred embodiment, the mRNA levels are decreased by at least about 70%, about 80%, about 90%, about 95%, about 99%, about 100%.

[0193] Another aspect of the invention relates to the agent that down-modulates the target gene, and formulations and compositions in which it is contained. Any known inhibitor or down-modulator of the target identified herein can be used as a down-modulating agent in the present methods. In addition, new agents are identified herein as useful as a down-modulatory agent in the treatment of cancer in a subject.

### Agents

[0194] Agents useful in the methods as disclosed herein may inhibit gene expression (i.e. suppress and/or repress the expression of a gene of interest (e.g., the target gene)). Such agents are referred to in the art as “gene silencers” and are commonly known to those of ordinary skill in the art. Examples include, but are not limited to a nucleic acid sequence, (e.g., for an RNA, DNA, or nucleic acid analogue). These can be single or double stranded. They can encode a protein of interest, can be an oligonucleotide, a nucleic acid analogue. Included in the term “nucleic acid sequences” are general and/or specific inhibitors. Some known nucleic acid analogs are peptide nucleic acid (PNA), pseudo-complementary PNA (pc-PNA), locked nucleic acids (LNA) and derivatives thereof. Nucleic acid sequence agents can also be nucleic acid sequences encoding proteins that act as transcriptional repressors, antisense molecules, ribozymes, small inhibitory nucleic acid sequences, such as RNAi, shRNAi, siRNA, micro RNAi (miRNA), antisense oligonucleotides. Many of these molecular functions are known in the art. As such these inhibiting can function as an agent in the present invention. In one embodiment, the RNAi comprises the nucleic acid sequences listed in the Table 9 for use in down-modulating the corresponding gene. Additional sequences may also be present. In another embodiment, the RNAi comprises a fragment of at least 5 consecutive nucleic acids of the sequences listed for use in down-modulating the corresponding gene listed.

[0195] Such an agent can take the form of any entity which is normally not present or not present at the levels being administered to the cell or organism. Agents such as chemicals; small molecules; nucleic acid sequences; nucleic acid analogues; proteins; peptides; aptamers; antibodies; or fragments thereof, can be identified or generated for use to downmodulate or inhibit.

[0196] Agents in the form of a protein and/or peptide or fragment thereof can also be designed to down-modulate a target. Such agents encompass proteins which are normally absent or proteins that are normally endogenously expressed in the host cell. Examples of useful proteins are mutated proteins, genetically engineered proteins, peptides, synthetic peptides, recombinant proteins, chimeric proteins, antibodies, midibodies, minibodies, triabodies, humanized proteins, humanized antibodies, chimeric antibodies, modified proteins and fragments thereof. Agents also include antibodies (polyclonal or monoclonal), neutralizing antibodies, or antibody fragments. A list of exemplary antibodies that can be used as inhibitors are included herein in Table 7. Also included in Table 7 are epitopes useful for generating antibodies using methods known to those of skill in the art. It is also contemplated herein that antibodies generated against these epitopes can be administered to an individual for down-modulating a target protein or for treatment of cancer.

[0197] Agents can also include peptides, proteins, peptide-mimetics, aptamers, hormones, small molecules, carbohydrates or variants thereof that function to inactivate the nucleic acid and/or protein of the gene products identified herein, and those as yet unidentified. Inhibitory agents can also be a chemical, small molecule, chemical entity, nucleic acid sequences, nucleic acid analogues or protein or polypeptide or analogue or fragment thereof. The agent may function directly in the form in which it is administered. Alternatively, the agent can be modified or utilized intracellularly to produce something which down-modulates a target, such as introduction of a nucleic acid sequence into the cell and its transcription resulting in the production of the nucleic acid and/or protein inhibitor within the cell. In some embodiments, the agent is any chemical, entity or moiety, including without limitation synthetic and naturally-occurring non-proteinaceous entities. In certain embodiments the agent is a small molecule having a chemical moiety. For example, chemical moieties included unsubstituted or substituted alkyl, aromatic, or heterocyclyl moieties including macrolides, leptomycins and related natural products or analogues thereof. Agents can be known to have a desired activity and/or property, or can be selected from a library of diverse compounds.

[0198] The agent may comprise a vector. Many such vectors useful for transferring exogenous genes into target mammalian cells are available. The vectors may be episomal, e.g., plasmids, virus derived vectors such cytomegalovirus, adenovirus, etc., or may be integrated into the target cell genome, through homologous recombination or random integration, e.g., retrovirus derived vectors such MMLV, HIV-1, ALV, etc. For modification of stem cells, lentiviral vectors are preferred. Lentiviral vectors such as those based on HIV or FIV gag sequences can be used to transfect non-dividing cells, such as the resting phase of human stem cells (see Uchida et al. (1998) P.N.A.S. 95(20): 11939-44). In some embodiments, combinations of retroviruses and an appropriate packaging cell line may also find use, where the capsid proteins will be functional for infecting the target cells. Usually, the cells and virus will be incubated for at least about 24 hours in the culture medium. The cells are then allowed to grow in the culture medium for short intervals in some applications, e.g. 24-73 hours, or for at least two weeks, and may be allowed to grow for five weeks or more, before analysis. Commonly used retroviral vectors are “defective”, i.e. unable to produce viral proteins required for productive infection. Replication of the vector requires growth in the packaging cell line.

[0199] As used herein, the term “vector” refers to a nucleic acid molecule capable of transporting another nucleic acid to which it has been linked. Preferred vectors are those capable of autonomous replication and/or expression of nucleic acids to which they are linked. Vectors capable of directing the expression of genes to which they are operatively linked are referred to herein as “expression vectors”.

[0200] Many viral vectors or virus-associated vectors are known in the art. Such vectors can be used as carriers of a nucleic acid construct into the cell. Constructs may be integrated and packaged into non-replicating, defective viral genomes like Adenovirus, Adeno-associated virus (AAV), or Herpes simplex virus (HSV) or others, including retroviral and lentiviral vectors, for infection or transduction into cells. The vector may or may not be incorporated into the cells genome. The constructs may include viral sequences for transfection, if desired. Alternatively, the construct may be incorporated into vectors capable of episomal replication, e.g. EPV and EBV vectors.

[0201] The inserted material of the vectors described herein may be operatively linked to an expression control sequence when the expression control sequence controls and regulates the transcription and translation of that polynucleotide sequence. The term “operatively linked” includes having an appropriate start signal (e.g., ATG) in front of the polynucleotide sequence to be expressed, and maintaining the correct reading frame to permit expression of the polynucleotide sequence under the control of the expression control sequence, and production of the desired polypeptide encoded by the polynucleotide sequence. In some examples, transcription of an inserted material is under the control of a promoter sequence (or other transcriptional regulatory sequence) which controls the expression of the recombinant gene in a cell- type in which expression is intended. It will also be understood that the inserted material can be under the control of transcriptional regulatory sequences which are the same or which are different from those sequences which control transcription of the naturally-occurring form of a protein. In some instances the promoter sequence is recognized by the synthetic machinery of the cell, or introduced synthetic machinery, required for initiating transcription of a specific gene. The promoter sequence may be a “tissue-specific promoter,” which means a nucleic acid sequence that serves as a promoter, i.e., regulates expression of a selected nucleic acid sequence operably linked to the promoter, and which affects expression of the selected nucleic acid sequence in specific cells, preferably in HIV host cells. The term also covers so-called “leaky” promoters, which regulate expression of a selected nucleic acid primarily in one tissue, but cause expression in other tissues as well.

[0202] The agent can be an RNA interference molecule. RNA interference agents can be used with the methods described herein, to inhibit the expression and/or activity of a target gene. “RNA interference (RNAi)” is an evolutionarily conserved process whereby the expression or introduction of RNA of a sequence that is identical or highly similar to a target gene results in the sequence specific degradation or specific post-transcriptional gene silencing (PTGS) of messenger RNA (mRNA) transcribed from that targeted gene (see Coburn, G. and Cullen, B., J. of Virology 76(18):9225 (2002), herein incorporated by reference in its entirety), thereby inhibiting expression of the target gene. As used herein, “inhibition of target gene expression” includes any decrease in expression or protein activity or level of the target gene or protein encoded by the target gene as compared to a situation wherein no RNA interference has been induced. The decrease can be of at least 20%, 30%, 40%, 50%, 60%, 70%, 80%, 90%, 95% or 99% or more as compared to the expression of a target gene or the activity or level of the protein encoded by a target gene which has not been targeted by an RNA interfering agent. RNA interfering agents contemplated for use with the methods described herein include, but are not limited to, siRNA, shRNA, miRNA, and dsRNAi. The target gene or sequence of the RNA interfering agent can be a cellular gene or genomic sequence.

[0203] An siRNA can be substantially homologous to the target gene or genomic sequence, or a fragment thereof. As used in this context, the term “homologous” is defined as being substantially identical, sufficiently complementary, or similar to the target mRNA, or a fragment thereof, to effect RNA interference of the target. Preferably, the siRNA is identical in sequence to its target and targets only one sequence. Each of the RNA interfering agents, such as siRNAs, can be screened for potential off-target effects by, for example, expression profiling. Such methods are known to one skilled in the art and are described, for example, in Jackson et al., Nature Biotechnology 6:635-637 (2003), herein incorporated by reference in its entirety. It is well within the ability of one skilled in the art to design and test for siRNAs that are useful for inhibiting expression and/or activity of a target gene. It is important to note that double-stranded siRNA or shRNA molecules that are cleaved by Dicer in the cell can be up to 100 times more ptent than a 21-mer siRNA or shRNA molecule supplied exogenously (Kim, D H., et al (2005) Nature Biotechnology 23(2):222-226). Thus, an RNAi molecule can be designed to be more effective by providing a sequence for Dicer cleavage.

[0204] Methods for effective siRNA design for use in vivo can be found in U.S. Pat. No. 7,427,605, which is herein incorporated by reference in its entirety. Commercially available RNA interference molecules that target a desired gene can be obtained from e.g., Santa Cruz Biotechnology Inc. (Santa Cruz, Calif.), Cell Signaling Technologies (Danvers, Mass.), Sigma-Aldrich (St. Louis, Mo.), and Dharmacon Inc. (Lafayette, Colo.), among others. In general, any method of in vivo delivery of a nucleic acid molecule can be adapted for use with an RNAi interference molecule (see e.g., Akhtar S. and Julian R L. (1992) Trends Cell. Biol. 2(5):139-144; WO94/02595, which are incorporated herein by reference in their entirety). However, there are three factors that are important to consider in order to successfully deliver an RNAi molecule in vivo: (a) biological stability of the RNAi molecule, (2) preventing non-specific effects, and (3) accumulation of the RNAi molecule in the target tissue. The non-specific effects of an RNAi molecule can be minimized by local administration by e.g., direct injection into a tumor or topically. Local administration of an RNAi molecule to a treatment site limits the exposure of the e.g., siRNA to systemic tissues and permits a lower dose of the RNAi molecule to be administered. Several studies have shown successful knockdown of gene products when an RNAi molecule is administered locally. For example, intraocular delivery of a VEGF siRNA by intravitreal injection in cynomolgus monkeys (Tolentino, M J., et al (2004) Retina 24:132-138) and subretinal injections in mice (Reich, S J., et al (2003) Mol. Vis. 9:210-216) were both shown to prevent neovascularization in an experimental model of age-related macular degeneration. In addition, direct intratumoral injection of an siRNA in mice reduces tumor volume (Pille, J., et al (2005) Mol. Ther. 11:267-274) and can prolong survival of tumor-bearing mice (Kim, W J., et al (2006) Mol. Ther. 14:343-350; Li, S., et al (2007) Mol. Ther. 15:515-523). RNA interference has also shown success with local delivery to the CNS by direct injection (Dorn, G., et al. (2004) Nucleic Acids 32:e49; Tan, P H., et al (2005) Gene Ther. 12:59-66; Makimura, H., et al (2002) BMC Neurosci. 3:18; Shishkina, G T., et al (2004) Neuroscience 129:521-528; Thakker, E R., et al (2004) Proc. Natl. Acad. Sci. U.S.A. 101:17270-17275; Akaneya, Y., et al (2005) J. Neurophysiol. 93:594-602) and to the lungs by intranasal administration (Howard, K A., et al (2006) Mol. Ther. 14:476-484; Zhang, X., et al (2004) J. Biol. Chem. 279:10677-10684; Bitko, V., et al (2005) Nat. Med. 11:50-55). For administering an RNAi molecule systemically for the treatment of a disease, the RNAi molecule can be either be modified or alternatively delivered using a drug delivery system; both methods act to prevent the rapid degradation of the RNAi molecule by endo- and exo-nucleases in vivo.

[0205] Modification of the RNAi molecule or the pharmaceutical carrier can also permit targeting of the RNAi molecule to the target tissue and avoid undesirable off-target effects. RNA interference molecules can be modified by chemical conjugation to lipophilic groups such as cholesterol to enhance cellular uptake and prevent degradation. For example, an siRNA directed against ApoB conjugated to a lipophilic cholesterol moiety was injected systemically into mice and resulted in knockdown of apoB mRNA in both the liver and jejunum (Soutschek, J., et al (2004) Nature 432:173-178). Conjugation of an RNAi molecule to an aptamer has been shown to inhibit tumor growth and mediate tumor regression in a mouse model of prostate cancer (McNamara, J O., et al (2006) Nat. Biotechnol. 24:1005-1015).

[0206] In an alternative embodiment, the RNAi molecules can be delivered using drug delivery systems such as e.g., a nanoparticle, a dendrimer, a polymer, liposomal, or a cationic delivery system. Positively charged cationic delivery systems facilitate binding of an RNA interference molecule (negatively charged) and also enhance interactions at the negatively charged cell membrane to permit efficient uptake of an siRNA by the cell. Cationic lipids, dendrimers, or polymers can either be bound to an RNA interference molecule, or induced to form a vesicle or micelle (see e.g., Kim S H., et al (2008) Journal of Controlled Release 129(2):107-116) that encases an RNAi molecule. The formation of vesicles or micelles further prevents degradation of the RNAi molecule when administered systemically. Methods for making and administering cationic-RNAi complexes are well within the abilities of one skilled in the art (see e.g., Sorensen, D R., et al (2003) J. Mol. Biol. 327:761-766; Verma, U N., et al (2003) Clin. Cancer Res. 9:1291-1300; Arnold, A S et al (2007) J. Hypertens. 25:197-205, which are incorporated herein by reference in their entirety). Some non-limiting examples of drug delivery systems useful for systemic administration of RNAi include DOTAP (Sorensen, D R., et al (2003), supra; Verma, U N., et al (2003), supra), Oligofectamine, “solid nucleic acid lipid particles” (Zimmermann, T S., et al (2006) Nature 441:111-114), cardiolipin (Chien, P Y., et al (2005) Cancer Gene Ther. 12:321-328; Pal, A., et al (2005) Int J. Oncol. 26:1087-1091), polyethyleneimine (Bonnet M E., et al (2008) Pharm. Res. August 16 Epub ahead of print; Aigner, A. (2006) J. Biomed. Biotechnol. 71659), Arg-Gly-Asp (RGD) peptides (Liu, S. (2006) Mol. Pharm. 3:472-487), and polyamidoamines (Tomalia, D A., et al (2007) Biochem. Soc. Trans. 35:61-67; Yoo, H., et al (1999) Pharm. Res. 16:1799-1804). In some embodiments, an RNAi molecule forms a complex with cyclodextrin for systemic administration. Methods for administration and pharmaceutical compositions of RNAi molecules and cyclodextrins can be found in U.S. Pat. No. 7,427,605, which is herein incorporated by reference in its entirety. Specific methods for administering an RNAi molecule for the inhibition of e.g., an activating Ras mutation can be found in e.g., U.S. Patent Application No. 20080152654, which is herein incorporated by reference in its entirety.

[0207] In some embodiments, in order to increase nuclease resistance in an RNAi agent as disclosed herein, one can incorporate non-phosphodiester backbone linkages, as for example methylphosphonate, phosphorothioate or phosphorodithioate linkages or mixtures thereof, into one or more non-RNASE H-activating regions of the RNAi agents. Such non-activating regions may additionally include 2′-substituents and can also include chirally selected backbone linkages in order to increase binding affinity and duplex stability. Other functional groups may also be joined to the oligonucleoside sequence to instill a variety of desirable properties, such as to enhance uptake of the oligonucleoside sequence through cellular membranes, to enhance stability or to enhance the formation of hybrids with the target nucleic acid, or to promote cross-linking with the target (as with a psoralen photo-cross- linking substituent). See, for example, PCT Publication No. WO 92/02532 which is incorporated herein in by reference.

### Pharmaceutical Compositions

[0208] In one embodiment, the agent described herein is an active ingredient in a composition comprising a pharmaceutically acceptable carrier. A “pharmaceutically acceptable carrier” means any pharmaceutically acceptable means to mix and/or deliver the targeted delivery composition to a subject. The term “pharmaceutically acceptable carrier” as used herein means a pharmaceutically acceptable material, composition or vehicle, such as a liquid or solid filler, diluent, excipient, solvent or encapsulating material, involved in carrying or transporting the subject agents from one organ, or portion of the body, to another organ, or portion of the body. Each carrier must be “acceptable” in the sense of being compatible with the other ingredients of the composition and is compatible with administration to a subject, for example a human. Such compositions can be specifically formulated for administration via one or more of a number of routes, such as the routes of administration described herein. Supplementary active ingredients also can be incorporated into the compositions.

### Screening Test Agents

[0209] Various biochemical and molecular biology techniques or assays well known in the art can be employed to practice the methods described herein. Such techniques are described in, e.g., Handbook of Drug Screening, Seethala et al. (eds.), Marcel Dekker (1st ed., 2001); High Throughput Screening Methods and Protocols (Methods in Molecular Biology, 190), Janzen (ed.), Humana Press (1st ed., 2002); Current Protocols in Immunology, Coligan et al. (Ed.), John Wiley & Sons Inc (2002); Sambrook et al., Molecular Cloning: A Laboratory Manual, Cold Spring Harbor Press (3rd ed., 2001); and Brent et al., Current Protocols in Molecular Biology, John Wiley & Sons, Inc. (ringbou ed., 2003). Screens involve a test agent, which is a candidate molecule, to be used in a screen and/or applied in an assay for a desired activity (e.g., down-modulation of a target gene, inhibition of target protein activity, etc.). A “test agent” is screened to identify molecules that down-modulate a target gene (i.e., an inhibitor).

[0210] Test agents or compounds that can be screened with methods of the present invention include polypeptides, beta-turn mimetics, polysaccharides, phospholipids, hormones, prostaglandins, steroids, aromatic compounds, heterocyclic compounds, benzodiazepines, oligomeric N-substituted glycines, oligocarbamates, polypeptides, saccharides, fatty acids, steroids, purines, pyrimidines, derivatives, structural analogs or combinations thereof. Some test agents are synthetic molecules, and others natural molecules.

[0211] Test agents are obtained from a wide variety of sources including libraries of synthetic or natural compounds. Combinatorial libraries can be produced for many types of compound that can be synthesized in a step-by-step fashion. Large combinatorial libraries of compounds can be constructed by the encoded synthetic libraries (ESL) method described in WO 95/12608, WO 93/06121, WO 94/08051, WO 95/35503 and WO 95/30642. Peptide libraries can also be generated by phage display methods (see, e.g., Devlin, WO 91/18980). Libraries of natural compounds in the form of bacterial, fungal, plant and animal extracts can be obtained from commercial sources or collected in the field. Known pharmacological agents can be subject to directed or random chemical modifications, such as acylation, alkylation, esterification, amidification to produce structural analogs.

[0212] Combinatorial libraries of peptides or other compounds can be fully randomized, with no sequence preferences or constants at any position. Alternatively, the library can be biased, i.e., some positions within the sequence are either held constant, or are selected from a limited number of possibilities. For example, in some cases, the nucleotides or amino acid residues are randomized within a defined class, for example, of hydrophobic amino acids, hydrophilic residues, sterically biased (either small or large) residues, towards the creation of cysteines, for cross-linking, prolines for SH-3 domains, serines, threonines, tyrosines or histidines for phosphorylation sites, or to purines.

[0213] The test agents can be naturally occurring proteins or their fragments. Such test agents can be obtained from a natural source, e.g., a cell or tissue lysate. Libraries of polypeptide agents can also be prepared, e.g., from a cDNA library commercially available or generated with routine methods. The test agents can also be peptides, e.g., peptides of from about 5 to about 30 amino acids, with from about 5 to about 20 amino acids being preferred, and from about 7 to about 15 being particularly preferred. The peptides can be digests of naturally occurring proteins, random peptides, or “biased” random peptides. In some methods, the test agents are polypeptides or proteins. The test agents can also be nucleic acids. Nucleic acid test agents can be naturally occurring nucleic acids, random nucleic acids, or “biased” random nucleic acids. For example, digests of prokaryotic or eukaryotic genomes can be similarly used as described above for proteins.

[0214] In some preferred methods, the test agents are small molecule organic compounds, e.g., chemical compounds with a molecular weight of not more than about 1,000 or not more than about 500. Preferably, high throughput assays are adapted and used to screen for such small molecules. In some methods, combinatorial libraries of small molecule test agents as described above can be readily employed to screen for small molecule compound that inhibit HIV infection. A number of assays are available for such screening, e.g., as described in Schultz (1998) BioorgMed Chem Lett 8:2409-2414; Weller (1997) Mol Divers. 3:61-70; Femandes (1998) Curr Opin Chem Biol 2:597-603; and Sittampalam (1997) Curr Opin Chem Biol 1:384-91.

[0215] Humanized forms of mouse antibodies can be generated by linking the CDR regions of non-human antibodies to human constant regions by recombinant DNA techniques. See Queen et al., Proc. Natl. Acad. Sci. USA 86, 10029-10033 (1989) and WO 90/07861. Human antibodies can be obtained using phage-display methods. See, e.g., Dower et al., WO 91/17271; McCafferty et al., WO 92/01047. In these methods, libraries of phage are produced in which members display different antibodies on their outer surfaces. Antibodies are usually displayed as Fv or Fab fragments. Phage displaying antibodies with a desired specificity are selected by affinity enrichment to a HDF.

[0216] Human antibodies against target proteins can also be produced from non-human transgenic mammals having transgenes encoding at least a segment of the human immunoglobulin locus and an inactivated endogenous immunoglobulin locus. See, e.g., Lonberg et al., WO93/12227 (1993); Kucherlapati, WO 91/10741 (1991). Human antibodies can be selected by competitive binding experiments, or otherwise, to have the same epitope specificity as a particular mouse antibody. Some non-limiting examples of epitopes useful for generating humanized antibodies are listed herein in Table 7. Humanized antibodies are particularly likely to share the useful functional properties of the mouse antibodies. Human polyclonal antibodies can also be provided in the form of serum from humans immunized with an immunogenic agent. Optionally, such polyclonal antibodies can be concentrated by affinity purification using an target or its fragment.

[0217] Typically, test agents are first screened for ability to down-modulate a biological activity of an target identified herein. A number of assay systems can be employed in this screening step. The screening can utilize an in vitro assay system or a cell-based assay system. In this screening step, test agents can be screened for binding to a target, altering expression level of the target gene, or modulating other biological or molecular activities (e.g., enzymatic activities) of the protein.

### Dosage and Administration

[0218] In one aspect, the methods described herein provide a method for inhibiting growth and survival of a cancer cell in a subject. In one embodiment, the subject can be a mammal. In another embodiment, the mammal can be a human, although the approach is effective with respect to all mammals. In one embodiment, the method comprises administering to the subject an effective amount of a pharmaceutical composition comprising an agent that inhibits Ras activity, in a pharmaceutically acceptable carrier.

[0219] The dosage range for the agent depends upon the potency, and includes amounts large enough to produce the desired effect, e.g., a reduction in Ras activity as assessed using a competition assay, such as that described herein in Example 2. The dosage should not be so large as to cause unacceptable adverse side effects. Generally, the dosage will vary with the type of agent or inhibitor (e.g., an antibody or fragment, small molecule, siRNA, etc.), and with the age, condition, and sex of the patient. The dosage can be determined by one of skill in the art and can also be adjusted by the individual physician in the event of any complication. Typically, the dosage will range from 0.001 mg/kg body weight to 5 g/kg body weight. In some embodiments, the dosage range is from 0.001 mg/kg body weight to 1 g/kg body weight, from 0.001 mg/kg body weight to 0.5 g/kg body weight, from 0.001 mg/kg body weight to 0.1 g/kg body weight, from 0.001 mg/kg body weight to 50 mg/kg body weight, from 0.001 mg/kg body weight to 25 mg/kg body weight, from 0.001 mg/kg body weight to 10 mg/kg body weight, from 0.001 mg/kg body weight to 5 mg/kg body weight, from 0.001 mg/kg body weight to 1 mg/kg body weight, from 0.001 mg/kg body weight to 0.1 mg/kg body weight, from 0.001 mg/kg body weight to 0.005 mg/kg body weight. Alternatively, in some embodiments the dosage range is from 0.1 g/kg body weight to 5 g/kg body weight, from 0.5 g/kg body weight to 5 g/kg body weight, from 1 g/kg body weight to 5 g/kg body weight, from 1.5 g/kg body weight to 5 g/kg body weight, from 2 g/kg body weight to 5 g/kg body weight, from 2.5 g/kg body weight to 5 g/kg body weight, from 3 g/kg body weight to 5 g/kg body weight, from 3.5 g/kg body weight to 5 g/kg body weight, from 4 g/kg body weight to 5 g/kg body weight, from 4.5 g/kg body weight to 5 g/kg body weight, from 4.8 g/kg body weight to 5 g/kg body weight. In one embodiment, the dose range is from 5 μg/kg body weight to 30 μg/kg body weight. Alternatively, the dose range will be titrated to maintain serum levels between 5 μg/mL and 30 μg/mL.

[0220] Administration of the doses recited above can be repeated for a limited period of time. In some embodiments, the doses are given once a day, or multiple times a day, for example but not limited to three times a day. In a preferred embodiment, the doses recited above are administered daily for several weeks or months. The duration of treatment depends upon the subject's clinical progress and responsiveness to therapy. Continuous, relatively low maintenance doses are contemplated after an initial higher therapeutic dose.

[0221] A therapeutically effective amount is an amount of an agent that is sufficient to produce a statistically significant, measurable change in e.g., Ras activity, tumor size, tumor volume etc. (see “Efficacy Measurement” below). Such effective amounts can be gauged in clinical trials as well as animal studies for a given inhibitor.

[0222] Agents useful in the methods and compositions described herein can be administered topically, intravenously (by bolus or continuous infusion), orally, by inhalation, intraperitoneally, intramuscularly, subcutaneously, intracavity, and can be delivered by peristaltic means, if desired, or by other means known by those skilled in the art. For the treatment of tumors, the agent can be administered systemically, or alternatively, can be administered directly to the tumor e.g., by intratumor injection or by injection into the tumor's primary blood supply.

[0223] Therapeutic compositions containing at least one agent can be conventionally administered in a unit dose. The term “unit dose” when used in reference to a therapeutic composition refers to physically discrete units suitable as unitary dosage for the subject, each unit containing a predetermined quantity of active material calculated to produce the desired therapeutic effect in association with the required physiologically acceptable diluent, i.e., carrier, or vehicle.

[0224] The compositions are administered in a manner compatible with the dosage formulation, and in a therapeutically effective amount. The quantity to be administered and timing depends on the subject to be treated, capacity of the subject's system to utilize the active ingredient, and degree of therapeutic effect desired. An agent can be targeted by means of a targeting moiety, such as e.g., an antibody or targeted liposome technology. In some embodiments, a agent or inhibitor can be targeted to tissue- or tumor-specific targets by using bispecific antibodies, for example produced by chemical linkage of an anti-ligand antibody (Ab) and an Ab directed toward a specific target. To avoid the limitations of chemical conjugates, molecular conjugates of antibodies can be used for production of recombinant bispecific single-chain Abs directing ligands and/or chimeric inhibitors at cell surface molecules. The addition of an antibody to an agent or inhibitor permits the agent attached to accumulate additively at the desired target site. Antibody-based or non- antibody-based targeting moieties can be employed to deliver a ligand or the inhibitor to a target site. Preferably, a natural binding agent for an unregulated or disease associated antigen is used for this purpose.

[0225] Precise amounts of active ingredient required to be administered depend on the judgment of the practitioner and are particular to each individual. However, suitable dosage ranges for systemic application are disclosed herein and depend on the route of administration. Suitable regimes for administration are also variable, but are typified by an initial administration followed by repeated doses at one or more intervals by a subsequent injection or other administration. Alternatively, continuous intravenous infusion sufficient to maintain concentrations in the blood in the ranges specified for in vivo therapies are contemplated.

[0226] In some embodiments, an inhibitor may be combined with one or more agents such as chemotherapeutic or anti-angiogenic agents, for the treatment of cancer.

[0227] In one embodiment, the dose of an agent or inhibitor administered for treatment of a cancer is less than the dose necessary to prevent total mitotic arrest. An appropriate dosage range for in vivo use can be titrated and selected by first determining a dose of agent that completely abolishes mitosis in a particular cell type in culture (i.e., toxic dose). Working below the toxic dose, a therapeutically effective dose can be estimated by assessing e.g., Ras activity at a variety of doses. This dosage range can be further titrated in vivo as deemed necessary by one of skill in the art, while taking into account such factors as family history of disease, prognostic markers, and severity of disease.

### Efficacy Measurement

[0228] The efficacy of a given treatment for a cancer or activating Ras mutation can be determined by the skilled clinician. However, a treatment is considered “effective treatment,” as the term is used herein, if any one or all of the signs or symptoms of, as but one example, cancer are altered in a beneficial manner, other clinically accepted symptoms or markers of disease are improved, or even ameliorated, e.g., by at least 10% following treatment with an inhibitor. Efficacy can also be measured by failure of an individual to worsen as assessed by hospitalization or need for medical interventions (i.e., progression of the disease is halted or at least slowed). Methods of measuring these indicators are known to those of skill in the art and/or described herein. Treatment includes any treatment of a disease in an individual or an animal (some non-limiting examples include a human, or a mammal) and includes: (1) inhibiting the disease, e.g., arresting, or slowing the pathogenic growth of cancer cells; or (2) relieving the disease, e.g., causing regression of symptoms, reducing the size of a tumor; and (3) preventing or reducing the likelihood of the development of a neovascular disease, e.g., an ocular neovascular disease).

[0229] An effective amount for the treatment of cancer or an activating Ras mutation means that amount which, when administered to a mammal in need thereof, is sufficient to result in effective treatment as that term is defined herein, for that disease. Efficacy of an agent can be determined by assessing physical indicators of, for example cancer, such as e.g., tumor size, tumor volume, tumor growth rate, metastatic phenotype, etc.

[0230] For treatment of a subject with an inhibitor of e.g., Ras activation, the in vivo efficacy of an agent can be assessed by e.g., rate of tumor growth, Ras activity in a biopsy sample, tumor volume, inhibition of neovascular growth or assessing a decrease in various markers of angiogenesis as described herein.

[0231] Unless otherwise defined herein, scientific and technical terms used in connection with the present application shall have the meanings that are commonly understood by those of ordinary skill in the art. Further, unless otherwise required by context, singular terms shall include pluralities and plural terms shall include the singular.

[0232] It should be understood that this invention is not limited to the particular methodology, protocols, and reagents, etc., described herein and as such may vary. The terminology used herein is for the purpose of describing particular embodiments only, and is not intended to limit the scope of the present invention, which is defined solely by the claims.

[0233] All patents, patent applications, and publications identified are expressly incorporated herein by reference for the purpose of describing and disclosing, for example, the methodologies described in such publications that might be used in connection with the present invention. These publications are provided solely for their disclosure prior to the filing date of the present application. Nothing in this regard should be construed as an admission that the inventors are not entitled to antedate such disclosure by virtue of prior invention or for any other reason. All statements as to the date or representation as to the contents of these documents is based on the information available to the applicants and does not constitute any admission as to the correctness of the dates or contents of these documents.

### EXAMPLES

### Example 1

[0234] A library of short-hairpin RNAs (shRNAs) was previously developed that targets most of the annotated protein-coding genes in the human genome (published in Silva et al. 2004). These shRNAs are embedded in the sequence context of a naturally occurring micro-RNA miR30, each carries a unique 60 nucleotide barcode sequence, and they can be expressed using either retroviral or lentiviral vectors in cells to achieve stable knockdown of target genes through the mechanism of RNAi. Using this library one can systematically interrogate cells for genes whose loss of function (as a result of shRNA-mediated knockdown of their expression) confer a desired phenotype, such as the selective impairment of cancer cell viability.

[0235] A sub-pool of the shRNA library shown in Table 9 was screened, that includes shRNAs targeting all human kinases & phosphatases, genes involved in protein ubiquitination/degradation pathways, and genes that are implicated in human cancer. A retroviral vector was used to deliver this pool of shRNAs into 4 cell lines: the colon cancer cell lines DLD-1 and HCT116, the breast cancer cell line HCC1954, and the normal human mammary epithelial cell line HMEC.

[0236] To identify genes whose knockdown impairs cell viability, the relative abundance of their corresponding shRNAs was measured at two time points: an initial time point within 72 hours of the retroviral infection of the shRNA, and an end point after the infected cells have been passaged for several weeks.

[0237] A new methodology was developed to track the relative abundance of individual shRNAs in a complex pool using microarray hybridization. This method is referred to herein as “Half-hairpin Hybridization”. Using the polymerase chain reaction (PCR), one can recover the anti-sense half of the shRNA sequence (i.e. the half-hairpin) from genomic DNA and, after dye-labeling, hybridize to a microarray containing the corresponding probes of the complementary (sense) sequences, with high fidelity. shRNA half-hairpins were PCR recovered from genomic DNAs of cells at the initial and end time points, labeled with Cy5 and Cy3 dyes, respectively, and competitively hybridized to a microarray with the corresponding probes. The Cy3:Cy5 signal ratio was measured for each probe, which is a direct reflection of the change in the relative abundance of that particular shRNA species in the cell population over time. A negative Cy3:Cy5 ratio, measured on a log₂ scale, indicates the shRNA has been depleted in the population over time, and therefore its target gene is considered to be necessary for growth processes in the cell of interest. Additional statistical criteria was employed to identify genes necessary for growth and survival for each of the aforementioned 4 cell lines. By comparing the list of genes among these cell lines, genes were identified that were preferentially expressed in cancer cell lines (DLD-1, HCT116 or HCC1954) but not in the normal HMEC cell line were identified.

[0238] It is important to note that many of the genes preferentially expressed in cancer cells are necessary for growth, survival or development of normal cells, however the dysregulation of these growth pathways and evasion from cell death mediators leads to pathological growth and/or formation of a tumor. By comparing the expression of genes in cancer cells to that of normal cells permits one to identify the growth pathways that are perturbed in a cancer cell but are appropriately regulated in a normally dividing cell. In this manner, a cancer cell can be effectively targeted for treatment with the methods described herein, while having a minimal effect on normally dividing cells.

[0239] Also identified were a number of genes whose knockdown by shRNA specifically impaired the viability of DLD-1, HCT116, HCC1954 and HMECs cells. Genes were identified from this dataset that when knocked down specifically impaired the viability of one of the 3 cancer cell lines (DLD-1, HCT116, or HCC1954), but not that of the normal HMECs. These genes are listed herein in Tables 3, 4 and 5. These tables also provide the log₂ Cy3:Cy5 ratio data to indicate cancer-cell selectivity. Because of the selective requirement of some of these genes by cancer cells but not normal cells, inhibition or down-modulation of the gene or their protein products are useful in the treatment of cancer, particularly colon and breast cancers.

[0240] Barcoded, microRNA-based shRNA libraries were generated to target the entire human genome that can be expressed efficiently from retroviral or lentiviral vectors in a variety of cell types for stable gene knockdown (P. J. Paddison et al., Nature 428, 427 (2004); J. M. Silva et al., Nat. Genet. 37, 1281 (2005)). Furthermore, we have also developed a method of screening complex pools of shRNAs using barcodes coupled with microarray deconvolution to take advantage of the highly parallel format, low cost, and flexibility in assay design of this approach (J. M. Silva et al., Nat. Genet. 37, 1281 (2005); T. F. Westbrook et al., Cell 121, 837 (2005)). Although barcodes are not essential for enrichment screens (positive selection) (T. F. Westbrook et al., Cell 121, 837 (2005); N. Popov et al., Nat. Cell Biol. 9, 765 (2007); I. G. Kolfschoten et al., Cell 121, 849 (2005)), they are critical for dropout screens (negative selection) such as those designed to identify cell lethal or drug sensitive shRNAs (V. N. Ngo et al., Nature 441, 106 (2006)). Hairpins that are depleted over time can be identified through the competitive hybridization of barcodes derived from the shRNA population before and after selection to a microarray (FIG. 1A).

[0241] The use of 60-mer barcodes for pool deconvolution has been previously described (J. M. Silva et al., Nat. Genet. 37, 1281 (2005); T. F. Westbrook et al., Cell 121, 837 (2005)). To provide an alternative to these bar-codes that enables a more rapid construction and screening of shRNA libraries, methodology called half-hairpin (HH) barcoding for deconvoluting pooled shRNAs was developed. A PCR strategy that amplifies only the 3′-half of the shRNA stem was designed and used from the large 19-nt hairpin loop of our mir30-based platform (FIG. 1B). Compared to using full hairpin sequences for microarray hybridization (K. Berns et al., Nature 428, 431 (2004); T. R. Brummelkamp et al., Nat. Chem. Biol. 2, 202 (2006)). HH barcodes entirely eliminate probe self-annealing during microarray hybridization (FIGS. 1C, 5A and 5B), providing the critical dynamic range necessary for pool-based dropout screens. HH barcode signals are highly reproducible in replicate PCRs (R=0.973, FIG. 5A), highly specific (0.5% cross reaction) (FIG. 5C), and display reasonable, although slightly compressed, dynamic range in mixing experiments where sub-pool inputs are varied in competitive hybridization experiments (FIGS. 5D and 5E). Taken together, these results indicate HH barcodes are alternatives to the 60-mer barcodes originally designed into the library.

[0242] A central goal is to develop the means to rapidly perform dropout screens to systematically identify genes required for cancer cell proliferation and survival that could represent new drug targets. The screening platform was used to interrogate human DLD-1 and HCT116 colon cancer cells, human HCC1954 breast cancer cells and normal human mammary epithelial cells (HMECs). Colon and breast cancer cells, two types of cancers with distinct origins, were compared to maximize our ability to identify common and cancer-specific growth regulatory pathways. Recent large-scale efforts have identified a distinct spectrum of mutations in these two cancer types (T. Sjoblom et al., Science 314, 268 (2006); L. D. Wood et al., Science 318, 1108 (2007)). Also, the comparison between cancer and normal mammary epithelial cells can reveal potential growth and survival adaptations specific to cancer cells. A highly complex pool of 8203 distinct shRNAs (Table 9) was constructed to target 2924 genes consisting of annotated kinases, phosphatases, ubiquitination pathway and cancer-related genes (Table 1). These genes were chosen because they are central regulators of signaling pathways that can provide a rich source of phenotypic perturbation. These shRNAs were placed in an MSCV-retroviral vector (R. A. Dickins et al., Nat. Genet. 37, 1289 (2005)), MSCV-PM, that functions efficiently at single copy.

[0243] Each cell line was screened in independent triplicates. Cells were infected with an average representation of 1000 per shRNA and a multiplicity of infection (MOI) of 1-2. Initial reference samples were collected 48-72 hours post-infection. The remaining cells were puromycin-selected, propagated for several weeks and collected again as the end samples. HH barcodes were PCR-recovered from genomic DNA, labeled with Cy5 and Cy3 dyes, respectively, and hybridized to a HH barcode microarray (FIG. 1A). The Cy3/Cy5 signal ratio of each probe reports the change in relative abundance of a particular shRNA between the beginning and the end of the experiment. Both correlations between initial samples across the triplicates and between the initial and end samples within each replica were high, indicating the triplicates were highly reproducible and representation was well-maintained throughout the experiment.

[0244] To identify shRNAs that consistently changed abundance in each cell line, datasets were analyzed using a custom statistical package based on the LIMMA method (G. K. Smyth, T. Speed, Methods 31, 265 (2003)) for 2-color cDNA microarray analysis. Whereas the majority of shRNAs show little changes in their abundance over time (log, ratio between −1 and 1), a small fraction of shRNAs showed depletion (FIG. 2A). Based on their shRNA dropout signatures, unsupervised hierarchical clustering segregated the 3 cancer cell lines from the normal HMECs, likely reflecting fundamental differences between cancer and normal cells (FIG. 2B). Furthermore, the two colon cancer cell lines were more similar to each other than the breast cancer line, reflecting the differences in their tissues of origin and paths to tumorigenesis. Overall, 114 shRNAs (1.4%) representing 88 genes (3.0%) in DLD-1 cells were found, 202 shRNAs (2.5%) representing 115 genes (3.9%) were found in HCT116 cells, 177 shRNAs (2.2%) representing 159 genes (5.4%) were found in HCC1954 cells, and 819 shRNAs (10.0%) representing 695 genes (23.8%) were found in HMEC cells to show statistically significant depletion (FIG. 2C). The lists of anti-proliferative shRNAs show significant overlap (p<10⁻⁴⁰), with 23 shRNAs and 19 genes scoring in all four lines (FIG. 2D). As expected, the screen recovered components of core cellular modules essential for all cell lines (FIGS. 3A and 3B). For example, shRNAs against multiple subunits of the anaphase promoting complex (APC/C) (DLD-1 p=9.65×10⁻⁵; HCT116 p=2.99×10⁻⁹; HCC1954 p=1.41×10⁻⁵; HMEC p=5.80×10⁻⁶), the COP9 signalosome (DLD-1 p=2.48×10⁻⁶; HCT116 p=9.34×10⁻⁶; HCC1954 p=4.54×10⁻⁵; HMEC p=0.032), and the eukaryotic translation initiation factor 3 (eIF3) complex (DLD-1 p=1.42×10⁻⁵; HCT116 p=7.98×10⁻⁸; HCC1954 p=0.00024; HMEC p=0.0086) were identified (FIG. 3B). A number of key proteins in the ubiquitination and sumoylation pathways, including most of the cullins, were also identified. Importantly, multiple shRNAs against the same gene were scored in the screen, indicating their effects are unlikely due to off-target effects.

[0245] Next EIF3S10 and RBX1, two genes essential for viability in all 4 cell lines were validated. For each gene, shRNAs were included that scored in the screen as well as additional shRNA sequences present in the library (Table 1). Cells were infected with individual retroviral shRNAs and cell viabilities were assessed (FIG. 3C). For each gene, all of the shRNAs that scored in the screen and many additional shRNAs gave anti-proliferative phenotypes. Furthermore, the anti-proliferative activity of the shRNAs correlated very well with the extent of target gene knockdown, as shown for RBX1. Thus, these phenotypes are likely due to target gene knockdown rather than off-target effects. This is consistent with a previous transfection-based screen with this library showing ˜90% “on target” efficiency (V. M. Draviam et al., Nat. Cell Biol. 9, 556 (2007)).

[0246] In addition to the common set of shRNAs that impair viability in all cell lines, we observed a substantial number of genes that are selectively required for proliferation of each cell line (Tables 3-5). Without wishing to be bound by theory, changes in these genes may reflect differences in the underlying oncogenic context, and therefore represent potential cancer-selective drug targets. The gene PPP1R12A, which encodes a regulatory subunit of protein phosphatase 1, was validated for its selective requirement in HCC1954 but not DLD-1 cells (FIG. 4A). The PPP1R12A shRNA that gave the greatest depletion (shRNA 3) showed the strongest effect on HCC1954 cells but only marginally affected DLD-1 viability (FIGS. 4B and 6B). This was corroborated with 4 additional PPP1R12A siRNAs. These shRNAs and siRNAs resulted in comparable knockdown of PPP1R12A protein in both cell lines (FIG. 6B), indicating that the selective requirement for PPP1R12A by HCC1954 cells is not due to different degrees of protein knockdown. PPP1R12A has been shown to target protein phosphatase 1 (PP1) isoforms to several substrates including myosin and merlin (M. Ito, T. Nakano, F. Erdodi, D. J. Hartshorne, Mol. Cell. Biochem. 259, 197 (2004); H. Jin, T. Sperka, P. Herrlich, H. Morrison, Nature 442, 576 (2006)). Thus, PP1 activity reduction by PPP1R12A knockdown may lead to increased phosphorylation of key proteins that disrupt the viability of HCC1954 cells. Conversely, PRPS2, which encodes phosphoribosyl pyrophosphate synthetase 2, an enzyme involved in nucleoside metabolism, is more selectively required by DLD-1 than HCC1954 cells (FIGS. 4C and 6C). These results indicate that distinct, genetic context-dependent vulnerabilities exist between these tumor cell lines.

[0247] Comparison between HCC1954 cells and normal HMECs also revealed a distinct subset of genes selectively required by each cell line (Table 5). A larger set of 695 genes are required by HMECs, likely reflecting the ability of normal cells to appropriately respond to various cellular stresses. Conversely, the relatively fewer genes required by the cancer cells underscores their ability to evade and overcome growth-inhibitory cues. Among the genes identified as essential for HMECs and HCT116 cells, but not DLD-1 or HCC1954 cells, is HDM2 encoding the human homolog of MDM2, the E3 ligase for p53 (FIG. 4D). HCC1954 and DLD-1 cells harbor inactivating mutations (Y163C and S241F, respectively) in the TP53 gene and are therefore insensitive to MDM2 knockdown. Multiple MDM2 shRNAs selectively impaired the viability of the p53 wildtype HMECs, but not HCC1954 cells with mutant p53 (FIGS. 4E and 6D). Furthermore, this finding was pharmacologically validated by interfering with MDM2 function using the inhibitor nutlin-3 (L. T. Vassilev et al., Science 303, 844 (2004)). and recapitulating the sensitivity of these cells to MDM2 inactivation (FIGS. 4F and 6D).

[0248] Importantly, a number of genes appear to be selectively required by HCC1954 cells but not HMECs (Table 5). Among these is the cell cycle regulator and spindle checkpoint kinase BUB1 (FIG. 4G). BUB1 was validated using both shRNA and siRNAs to confirm its knockdown is more detrimental to HCC1954 cells than HMECs (FIG. 4H), despite similar levels of BUB1 protein reduction (FIG. 6E). These results indicate that BUB1 is likely to play an integral role in supporting the oncogenic transformation of HCC1954 cells as they are more dependent on BUB1 function. Without wishing to be bound by theory, one possible explanation for this enhanced dependency may be the near-tetraploid nature of the HCC1954 genome. Compared to the diploid HMECs, HCC9154 cells may rely more heavily on the spindle checkpoint to maintain genomic stability. Such a dependency is an example of “non-oncogene addiction” where cancer cells come to be highly dependent for growth and survival on the functions of genes that are themselves not oncogenes (N. L. Solimini, J. Luo, S. J. Elledge, Cell 130, 986 (2007)).

[0249] It is demonstrated herein that highly parallel dropout screens using complex pools of shRNAs can be achieved using HH barcodes in combination with highly-penetrant vectors. The ability to identify anti-proliferative shRNAs specific to particular cell lines indicates that different cancer cells have distinct growth and survival requirements that cluster with cancer type. Targeting such vulnerabilities is one approach for cancer-selective therapeutics. The functional genetic approach demonstrated herein presents an alternative and complementary effort to sequencing-based approaches such as the Cancer Genome Atlas (TCGA) and similar efforts, which focus on physical alterations of the cancer genome.

[0250] The most complex pool employed contains 42,000 distinct shRNAs (FIG. 7), an 80-fold increase in complexity compared to previous dropout screens based on these designs (V. N. Ngo et al., Nature 441, 106 (2006)). It is now conceivable to screen the entire human genome with ˜3 shRNAs per gene with a pool of ˜100,000 shRNAs in ˜100 million cells. Thus, a large number of cancer and normal cell lines can be rapidly screened in this manner, with the goal of generating “cancer lethality signatures” for different cancer types and thus identifying cancer type-specific lethal genes representing potential drug targets.

### Methods and Materials

### Cell Culture and Virus Production

[0251] HCT116 and DLD-1 colon cancer cells were gifts from Dr. Todd Waldman and Dr. Bert Vogelstein. Both HCT116 cells and DLD-1 cells were maintained in McCoy's 5A media with 10% FBS. HCC1954 breast cancer cells were from American Type Culture Collection (ATCC™) and were maintained in RPMI-1640 media with 10% FBS. HMECs taken from a reduction mammoplasty were immortalized with human telomerase and maintained in MEGM media (LONZAT™). Mouse CCE ES cells were from StemCell Technology, and were maintained in Knockout DMEM (INVITROGEN™) with 15% ES serum (HYCLONE™), 1% non-essential amino acids, 2 mM Glutamine (INVITROGEN™), 0.1 mM b-ME, 1000 U ESGRO (CHEMICON™).

[0252] Retroviruses were produced by transfecting 293T cells with MSCV-PM-shRNA, pCG-gag/pol, and pVSV-G plasmids using TranslT-293 (MIRUS®) per manufacturer's instructions. Retroviral supernatant was filtered, titered, and stored at −80° C. until use.

[0253] For the screen, HCT116, DLD-1, HCC1954, HMECs, and CCE ES cells were infected using 4-8 μg/ml polybrene (SIGMA®) in 150 mm plates. Three independent infections were carried out for each cell line with an MOI of 1-2 and an average representation of ˜1,000. Viruses were removed 24 h later, and a fraction of cells were collected at 48-72 h post infection as the initial samples (PD=0). Cells were then selected with puromycin (0.5-2 μg/ml) to remove the small number of uninfected cells. Cells were passaged accordingly when reaching ˜80% confluency (except in the case of ES cells, which were passaged every 2 days). For each passage a minimal representation of 1,000 was maintained for the population. For the initial and end samples sufficient cells were collected such that the representation exceeds 1,000. Cell pellets were stored at −80° C.

Vectors, Cloning, and shRNA Libraries

[0254] The EcoRI site of pMSCV-puro (CLONTECH®) was converted to an MluI site to generate pMSCV-PM (pMSCV-Puro-MluI). The PheS Gly294 gene was inserted into the XhoI/MluI sites of pMSCV-PM to generate pMSCV-PM-PheS and allow for negative selection on Cl-Phe agar plates when transferring shRNA fragments from pSM2. The second generation Elledge-Hannon human and mouse shRNA libraries were subcloned from the SalI/MluI sites of pSM2c into the XhoI/MluI sites of pMSCV-PM-PheS to generate human and mouse pMSCV-PM-shRNA libraries. A focused set of the human pMSCV-PM-shRNA library consisting of 2813 shRNAs targeting 506 protein kinases, 129 metabolic kinases, and 180 phosphatase catalytic and regulatory subunits, 3549 shRNAs against 837 ubiquitin-proteasome pathway genes (E1-E2-E3 proteins, deubiquitinating enzymes, ubiquitin-binding and ubiquitin-like proteins, proteasome subunits, regulators of cullins, autophagy genes, and components of the EIF3 complex), and 1841 shRNAs targeting 1272 genes implicated in cancer were chosen from the arrayed pSM2c-shRNA library and cloned as pools into the XhoI-MluI sites of pMSCV-PM-PheS as above. All cloning was performed with enzymes from New England Biolabs, Qiaex II or Qiaquick Gel Extraction kits from Qiagen, and DH5α bacteria from Invitrogen as previously described (M. Z. Li, S. J. Elledge, Nat. Genet. 37, 311 (2005)).

### Genomic DNA Preparation, Half-Hairpin Barcode PCR and Probe Labeling

[0255] For human cells, genomic DNA was extracted by incubating in 10 mM Tris-HCl pH 8.0, 10 mM EDTA, 0.5% SDS, and 0.2 mg/ml proteinase K, 25 μg/ml RNAse A at 55° C. for 3-12 h, followed by addition of 0.2 M NaCl. For ES cells, genomic DNA was extracted from each replicate of each pool by incubating in 10 mM Tris pH 8.0, 10 mM EDTA, 10 mM NaCl, 0.5% Sarcosyl, 0.1 mg/ml RNAseA at 37° C. for 30 mM and then adding 0.5 mg/ml Proteinase K and incubating at 55° C. for 2 h. Genomic DNA was phenol-chloroform extracted using Phase-Lock tubes (5-Prime), ethanol precipitated, and resuspended in 10 mM Tris-HCl pH 8.0 with 0.1 mM EDTA or 10 mM Tris-HCl pH 8.5.

[0256] Pooled genomic DNA was used as template for HH PCR using the forward primer JH353F: TAGTGAAGCCACAGATGTA and one of two reverse primers JH353R: TAATACGACTCACTATAGGGAGTGATTTAATTTATACCATT or BC1R: CCTCCCCTACCCGGTAGA. The 800 μl PCR reaction contained the following final concentrations: 30-60 μg gDNA template, 200 uM dNTPs, 400 nM for each PCR primer, 2% DMSO, 1× Hotstart Taq buffer, and 1 μl Hotstart Taq (TAKARA®). PCR was performed with the following program: 95° C. 5 min, 36 cycles of 94° C. 35 sec, 52° C. 35 sec, 72° C. 1 min, and a final step of 72° C. 10 min. PCR products for each replicate of each time point were pooled, precipitated, resuspended, and gel-purified using a QiaQuick columns (QIAGEN®).

[0257] To label the HH PCR products, 2 μg of the PCR product and 2 μg/ml random nonamer primer (final concentration) in 39.25 μl was boiled for 5 min and chilled on ice for 2 min. The reaction was then allowed to proceed at 37° C. for 2 h following the addition of 5 μl 10×NEB buffer 2, 1 μl of 10 mM dATP, dGTP, dTTP, 2.25 μl of Cy3 of Cy5 labeled-dCTP (AMERSHAM®), and 25 U Klenow (NEW ENGLAND BIOLABS™). Reactions were stopped with 5 μl of 0.5 M EDTA pH 8.0 and cleaned using Microcon tubes (YM-30, MILLIPORE™)

### Half-Hairpin Microarray Hybridizations

[0258] Custom microarrays of HH probes were synthesized by NIMBELGEN™ at a density of 12×13,000 (12 sub-arrays of 13,000 probes each). Homogeneity of annealing temperature for HH probes was optimized by minor variation in the size of the probes printed on the array through the inclusion of small regions adjacent to the HH to modulate hybridization kinetics and signal intensity. A hybridization mixture for each sub-array containing 180 ng labeled sample of each color, 4 μg/ml CPK6 oligonucleotide, 8 μg/ml Herring sperm DNA, 0.4 mg/ml BSA, and 1×MES Hyb buffer (100 μM MES, 1 M NaCl, 20 mM EDTA, 0.01% Tween-20, 10.5% glycerol) in 10 μl total volume was heated to 95° C. for 90 sec and maintained at 44° C. until loaded on the array. Each sub-array was hybridized with 5.94 μl of the hybridization mixture at 44° C. for 18-19 h. The 12-plex array was washed with 60 ml of stringent wash buffer (SWB, 100 μM MES, 0.1 M NaCl, 0.01% Tween-20) at 44° C. using a syringe through the port on the hybridization chamber followed by a brief wash with room temperature non-stringent wash buffer (NSWB, 6×SSPE 0.01% Tween-20). The array was transferred to warm SWB at 44° C. and incubated for 15 min with gentle agitation every 5 min followed by a brief transfer to NSWB. The array was then incubated in ice-cold 1:100 dilution of NSWB for 30 sec. The array was dried with compressed air and scanned using an Axon 4000B microarray scanner.

[0259] Mouse shRNA HH custom arrays were synthesized by Agilent at a density of 4×44,000 (4 sub-arrays of 44,000 probes each). A hybridization mixture for each sub-array consisting of 250 ng Cy5- and 250 ng Cy3-labeled probes, 55 μl 2× Agilent GEX hybridization buffer (Hi-RPM), 11 μl 10× Agilent blocking reagent, and water to a final volume of 110 μl was prepared and 100 μl was added each sub-array. Each sub-array was hybridized at 44° C. overnight, washed as per the manufacturer's wash protocol, and scanned using an Agilent microarray scanner.

### Cell Viability Assay

[0260] Cells were infected in triplicate in 96-well or 24-well plates with retroviruses of individual shRNAs as described above, and the media was replaced 24 h after infection. On days 2, 6, or 9 post-infection, cell viability was measured using CellTiter-Glo reagent (Promega) per manufacturer's instruction on a Wallac Victor2 plate reader (Perkin Elmer).

Transfection of siRNAs

[0261] Cells were transfected in triplicates using Lipofectamine RNAiMAX reagents (INVITROGEN™) per manufacturer's instructions. The final concentration of siRNAs in the transfection was 50 nM (in the case of PLK1 siRNA SMARTpool, which is a mixture of 4 siRNAs, 50 nM total siRNA) The media was changed after 24 h, and cell viability was assessed 4 days post-transfection as described above.

### Additional Reagents

[0262] The following primary and secondary antibodies were used for immunoblotting with the indicated dilutions: rabbit anti-Rbx1 and mouse anti-PRPS2 (1:500, Abcam), rabbit anti-MYPT1 (PPP1R12A gene product, 1:500, Upstate), mouse anti-tubulin and rabbit anti-GAPDH (1:2000, Sigma), mouse anti MDM2 (1:500, Santa Cruz), rabbit anti-BUB1 (1:500, Bethyl), mouse anti-p53 DO-1 and mouse anti-p21 (1:500, Calbiochem), goat anti-rabbit-HRP (1:5000, Jackson ImmunoResearch), and goat anti-mouse-HRP (1:5000, Jackson ImmunoResearch). Positive and negative siRNA controls, including siLUC, siTOX, siGLO duplexes and a PLK1 SMARTpool, were purchased from Dharmacon. Sequences for all shRNAs and siGENOME siRNA duplexes (Dharmacon) tested in the validation experiments are given in Table 9.

### Development of Half-Hairpin Barcode Method

[0263] When designing the original barcode strategy for the version 1 shRNA libraries using the U6 promoter and standard short hairpins of 25 bp stem and 6 base loop, the sequence of the hairpin was considered itself as a probe. The problem of probe self-annealing due to the hairpin structure led us to introduce a separate 60-mer barcode sequence into each construct. One potential limitation of this strategy, however, is that it requires extensive sequencing of each new library to generate barcode information and linkage to shRNA sequence. The second generation library design, which places a 21 bp stem and 19 base loop shRNA in the mir30 miRNA backbone, permits employing the shRNA sequences as barcodes for dropout screens using the new, higher-penetrance vectors. PCR primers were designed to anneal to the 19-base loop and the 3′-constant region of the mir30-based shRNA (FIG. 1B). These primers yield a PCR amplicon of 190 bp containing only the 3′-half of the shRNA, herein termed a half-hairpin (HH). Using HH barcodes for microarray hybridization entirely eliminated the problem of probe self-annealing (FIG. 1C), therefore enabling one to carry out pool-based dropout screens.

[0264] To assess the efficacy of HH probes, a plasmid DNA pool containing 12,852 unique shRNA hairpins was packaged as a retrovirus and infected into HCT116 human colon cancer cells. Two days after infection, genomic DNA was extracted from the infected cells. To test the reproducibility of the PCR, genomic DNA from a single sample was used as a template in two independent PCR reactions. The two PCR products were labeled with Cy3 or Cy5 dyes and competitively hybridized on a custom microarray containing HH probes for all 12,852 shRNAs. Most probes are 24 nt in length, however, probes with lower melting temperatures (Tₘ) were extended using sequence in the mir30 backbone to obtain a more uniform Tₘ. The Cy5 and Cy3 signal intensities had a correlation coefficient (R) for the pool reaching 0.973 (FIG. 5A) indicating the PCR and labeling reactions were highly reproducible. In addition, less than 3% of the probes exhibited a Cy3/Cy5 ratio greater than 2-fold in either direction, further supporting the reproducibility of the PCR and labeling reactions. Furthermore, independent triplicate infections of the library pools gave highly reproducible hybridization (FIG. 5B).

[0265] The utility of HH barcodes was compared with that of full-hairpin barcodes. When the full-hairpin amplicons were hybridized to a microarray containing the corresponding HH probes, they yielded very low signals, with less than 0.8% of the probes reaching >2-fold above background (FIG. 1C, bottom). In comparison, the HH amplicons yielded much stronger hybridization signal in the same experiment (FIG. 1C top and 5B).

[0266] The specificity of HH hybridization was tested by examining cross-hybridization of HH amplicons. The test pool of 12,852 plasmid shRNAs was divided into three sub-pools 1.1, 1.2 and 1.3 of approximately equal size (4,200 shRNAs each). Probes derived from sub-pool 1.1, containing 4,223 shRNAs, were hybridized to a microarray containing 12,852 HH probes against the entire pool (FIG. 5C). Of the probes corresponding to shRNAs present in sub-pool 1.1, 72.2% gave a signal >2-fold above background while sub-pool 1.3 probes on the microarray, for which no corresponding DNA was present in the PCR reaction, only 0.5% gave a signal >2-fold above background. Similar results were observed when the other sub-pools were employed as probes. Thus, hybridization of HH probes is highly specific and cross-hybridization occurs infrequently. It was also found through reconstitution mixing experiments of sub-pools that the HH microarrays faithfully reproduced the relative abundance of the different pools (FIGS. 5D and 5E), although the ratios were compressed for probes of low signal strength.

### Screen for Anti-Proliferative Genes in Cancer and Normal Cell Lines

[0267] Each screen was carried out in independent triplicates. Cells were infected with the retroviral shRNA pool at an average representation of 1000 per shRNA and an MOI of 1-2. Initial reference samples were collected 48-72 hours post-infection. The remaining cells were puromycin-selected and propagated for several weeks with an average shRNA representation of ≧1000 maintained at each passage. After ˜16 population doublings (PDs) of DLD-1 and HCT116 cells, ˜11 PDs of HCC1954 cells and ˜10 PDs of HMECs, cells were collected again as the end samples. For each replica, HH barcodes were PCR-amplified from genomic DNAs and probes were prepared from the initial and end samples and labeled with Cy5 and Cy3 dyes, respectively. The labeled PCR products were competitively hybridized to a microarray containing the corresponding probe sequences. Most probes (87.2% for DLD-1, 82.5% for HCT116, 84.0% for HCC1954 and 85.9% for HMECs) consistently yielded signal intensities >2-fold above the mean background signals of negative control probes. When 4 standard deviations above the background median was used as the cutoff criterion, 75-80% of probes still consistently made the cutoff.

### Large-Scale Anti-Proliferative Screen in Mouse ES Cells

[0268] To test if the screening strategy can be scaled to extremely complex libraries, the most complex library pool available, which was a mouse library consisting of 42,590 shRNAs against 22,996 mouse genes, was used. This library was screened for genes that impaired the viability of mouse embryonic stem (ES) cells. The screen was carried in independent triplicates similar to the protocol described above, and collected the initial samples at day 2 post infection and the end samples after 14 days of further cell passage.

[0269] From the microarray, 31,416 (73.8%) of the total 42,590 shRNAs consistently showed hybridization signals >2-fold above background in all 3 replicas in both the initial and the end samples, indicating that the complexity of this very large library was well maintained throughout the screen. More importantly, correlations between the replicate experiments at each time point were very high (0.95±0.02 for day 2 and 0.93±0.01 for day 16 samples), confirming the reliability and effectiveness of the screen. Within the 31,416 shRNAs measured, their log₂ Cy3/Cy5 ratios (FIG. 7A) identified 1116 shRNAs against 1077 genes with a consistent decrease in abundance of >2-fold by SAM with 5% FDR. Examples of candidate shRNAs are shown in FIG. 7B. A large fraction of these ES cell proliferation genes belong to the categories of metabolic enzymes and signal transduction pathway components involved in essential cellular functions (FIG. 7C). Thus, this screening methodology can be applied to very complex libraries with highly reproducible results.

### Statistical Analyses

[0270] The microarray datasets were analyzed using a custom statistical package that is based on the LIMMA method for the analysis of 2-color cDNA microarrays. To identify shRNAs that negatively impacted cell viability, intensity-dependent loess normalization was applied to obtain normalized log₂ Cy3/Cy5 ratios for the probes within each replica. This ratio represents the changes in an shRNA's relative abundance between the initial and end samples, with a negative ratio indicating depletion and a positive ratio enrichment over time. Probes with a mean signal <2-fold background from the analysis were removed. Lastly, the method of significance analysis for microarrays (SAM) was applied to identify shRNAs that are consistently depleted across the triplicates. A false-discovery rate (FDR) of 20% as well as Cy3/Cy5 ratio 2-fold cutoff was applied to the dataset for each cell line to identify shRNAs which reduce cell viability in the screen. Interaction network analysis was carried out using Ingenuity Pathway Analysis software (Ingenuity Systems). p values for genes scoring in interaction modules were calculated using a hypergeometric distribution. All p values in FIGS. 3 and 4 were generated using a one-tailed t-test assuming unequal variance. Hierarchical clustering analysis and heatmap generation was conducted using R.

### Example 2

### Treatment of Cells Bearing an Activating Ras Mutation(s)

[0271] A major challenge in cancer therapeutics is the identification of cellular drug targets whose inhibition leads to the selective killing of cancer cells while sparing normal cells. Recent advances in mammalian RNA interference (RNAi) technologies have made it possible to systematically interrogate the human genome for genes whose loss of function constitute synthetic lethality either with the oncogenic state or with particular oncogenic mutations (Ngo et al., 2006; Schlabach et al., 2008; Silva et al., 2008). Herein is described barcoded, retroviral/lentiviral-based short hairpin RNA (shRNA) libraries targeting the entire human genome to enable genome-wide loss-of-function analysis through stable gene knockdown (Silva et al., 2005). The design features of this shRNA library permits development of a multiplex screening platform that enables the highly parallel screening of >10,000 shRNAs in a pool-based format using microarray deconvolution for their effect on cell viability (Schlabach et al., 2008; Silva et al., 2008). These technological breakthroughs therefore make it possible to rapidly interrogate the genome for functional vulnerability of cancer cells. This approach is applied in a screen to identify shRNAs that constitute synthetic lethality with the Ras oncogene.

[0272] Despite its prominent status as a cancer drug target, therapeutics aimed at disrupting the Ras pathway have proven challenging thus far. Inhibitors of farnysyl transferase, the enzyme that prenylates Ras for its membrane localization, have met with only limited success (Karnoub and Weinberg, 2008). Chemical genetic screens using small molecule libraries in isogenic Ras mutant and wild type cell lines have identified compounds that exhibit preferential toxicity towards Ras muant cells (Bernards and Settleman, 2004; Dolma et al., 2003; Yang and Stockwell, 2008). Inhibitors targeting various Ras effector pathways could also prove efficacious in treat tumors with Ras mutations, as it was recently shown that a combined application of MEK and PI3K/mTOR inhibitors can reduce tumor burden in a mouse model of Ras-driven lung cancer (Engelman et al., 2008).

[0273] The systematic identification of genes and pathways necessary for the Ras-driven oncogenic state provides additional drug targets for therapeutic exploration, sheds new light on Ras's mechanisms of action and provide new biomarkers for patient stratification. To this end, the shRNA library was screened for genes whose knockdown constitute synthetic lethality with the KRAS oncogene using isogenic cell lines that are either mutant or wild type for K-Ras. A functionally diverse set of genes were identified that are more critically required for the viability of Ras mutant cells compared to Ras wild type cells, thus revealing a broad genetic networks not previously implicated in supporting the function of the Ras oncogene. In particular, it was discovered that Ras mutant cells are hypersensitive to the depletion of a number of mitotic proteins and demonstrate that pharmacological inhibitors targeting mitotic proteins can selectively impair the viability of Ras mutant cells. These findings point to a previously unappreciated role of Ras in mitotic progression and demonstrate that mitotic stress induced by the Ras oncogene might be exploited for therapeutic purposes.

### Results

### Genome-Wide RNAi Synthetic Lethal Screen Against the KRAS Oncogene

[0274] The colorectal cancer cell line DLD-1 was chosen for the primary screen (FIG. 8A). These cells carry a naturally occurring K-Ras G13D point mutation that is required for maintaining the oncogenic state of these cells (Shirasawa et al., 1993; Torrance et al., 2001). An isogenic clone of DLD-1 cells with the KRASG13D allele disrupted shows decreased MAP kinase signaling, reduced proliferation on adherent surface and is no longer able to sustain anchorage independent growth in vitro (FIG. 8B-D) and tumor growth in vivo (Shirasawa et al., 1993). Thus, despite other mutations present in DLD-1 cells, they clearly exhibit addiction to the KRAS oncogene and their malignant phenotype critically depends on mutant K-Ras function.

[0275] The parental KRAS WT/G13D (Ras Mut) DLD-1 cells and the isogenic KRAS WT/− (Ras WT) DLD-1 control cells were screened with a library of 74,905 retroviral shRNAs targeting 32,293 unique human gene transcripts (including 19,542 RefSeqs). The library was screened in 6 pools of ˜13,000 shRNAs per pool using a protocol as described previously (FIG. 8A) (Schlabach et al., 2008). For each pool, the change in relative abundance of every shRNA over time was analyzed by microarray hybridization to identify those that are anti-proliferative or cytotoxic and therefore dropout from the population. The lethality signature of the Ras Mut and WT cells were compared to identify those shRNAs that show selective depletion in the Ras Mut cells but not in the Ras WT cells. Such shRNAs are potential Ras synthetic lethal (RSL) candidates. Relaxed statistical criteria identified 1,741 RSL shRNAs targeting 1,613 genes, whereas a more stringent cutoff identified a subset 379 RSL shRNAs targeting 368 genes.

[0276] Next, a competition assay was devised to test the reproducibility of candidate RSL shRNAs from the primary screen (Torrance et al., 2001; Smogorzewska et al., 2007). Individual shRNAs were packaged into retroviruses and infected into a 50:50 mixture of GFP+ DLD-1 Ras Mut cells and GF\tilde{P} (colorless) DLD-1 Ras WT cells. The relative ratio of Ras Mut versus WT cells at ˜7 days post shRNA infection was analyzed by FACS and compared to that of a mixed population infected with a negative control shRNA targeting luciferase (FIG. 8E). Using this assay 320 candidate RSL shRNAs from the primary screen were tested and 89 shRNA (27.8%) targeting 82 genes were found to preferentially decrease the fitness of Ras Mut cells compared to Ras WT cells (Table 2). This validation rate is lower than what was observed with “straight lethal” shRNA analysis within individual cell lines (Schlabach et al., 2008). Without wishing to be bound by theory, a possible cause for the higher false positive rate in the primary screen might due to the fact that for the synthetic lethal analysis the difference between two microarray datasets is extracted and coupled with the fact that the secondary assay is much shorter than the original discovery assay. To rule out cell-line specific effect of candidate RSL shRNAs, candidates were tested using the competition assay in a second isogenic pair of colorectal cancer cell lines: HCT116 KRAS WT/G13D and HCT116 KRAS WT/−, which were derived with a similar method as the DLD-1 isogenic pair (Shirasawa et al., 1993; Torrance et al., 2001). Many shRNAs that scored in the DLD-1 cells also showed synthetic lethality in the HCT116 cells (53 of 72 tested, 73.6%, Table 4), indicating the majority of candidate RSL shRNAs are likely to interact genetically with the KRAS oncogene.

### Functional Diversity of Candidate RSL Genes

[0277] shRNAs against KRAS itself were recovered from the screen. In accordance with the phenotype of the Ras WT isogenic controls, shRNA-mediated knockdown of K-Ras expression (both Mut and WT protein) in both DLD-1 and HCT116 cells resulted only in modest decrease in growth on adhesive surface but severely impaired colony formation in soft-agarose (FIG. 15), thus confirming the inhibition of K-Ras itself to be sufficient for suppressing the malignant phenotype of these cells. Both the MAP kinase and PI 3-kinase pathways have been implicated in Ras-driven oncogenesis, but a few genes were recovered in these pathways from the primary screen. The effect of the MEK inhibitor U0126 and the PI3K inhibitor LY294002 was tested in these cells. At no concentration of these drugs was selective toxicity towards Ras Mut cells compared to Ras WT cells observed, indicating that inhibiting MEK or PI3K alone in these cells are not sufficient to constitute synthetic lethality (FIG. 15) (Haigis et al., 2008).

[0278] The list of candidate RSL genes is functionally diverse (FIG. 9A and Table 9). Using PANTHER (Thomas et al., 2003), several biological processes were identified including protein modification, nucleic acid metabolism, cell cycle and signal transduction that are enriched in the screen. Also identified were a number of molecular pathways that upon which Ras Mut cells are more dependent. For example, shRNAs against genes in ribosomal biogenesis and protein translation control (BXDC2, FBL, NOL5A, EIF3S8, EIF3S4, GSPT1, HNRNPC and METAP1), in protein neddylation (COPS3, COPS4, COPS8, NEDD8, NAE1/APPBP1) and sumoylation pathways (SAE1, UBA2 and UBE2I) and in RNA splicing (FIP1L1, NXF1, USP39, DHX8 and THOC1) were observed. Many of these are growth and survival genes, but reducing their activity leads to enhanced growth defects in Ras Mut cells. To rule out off-target effects, multiple shRNAs from library were tested against several of these candidate genes, and in the majority of the cases one or more additional shRNAs that give the same phenotype were identified (FIG. 9B).

[0279] These findings suggest that the Ras oncogene requires additional support from many genes to maintain the oncogenic state. For example, RNA processing/export factor THOC1, a member of the conserved TREX mRNA transport complex, was identified to be synthetically lethal with Ras (FIG. 9B). Indeed, THOC1 has been recently shown to be selectively required for the Ras-driven proliferation and transformation of murine fibroblasts (Li et al., 2007). Also identified were several subunits of the COP9 signalosome [Deshaies Review 2003], which regulates the activity of SCF ubiquitin ligases, whose depletion is synthetically lethal with Ras. Depleting either COPS3 or COPS4 impaired the fitness of Ras Mut cells relative to that of Ras WT cells in the competition assay (FIG. 9). Furthermore, DLD-1 Ras Mut cells with stable depletion of COPS4 exhibit both impaired growth on adherent surfaces and in soft agarose (FIG. 9).

### Ras Mutant Cells are Sensitive to Mitotic Perturbations

[0280] A number of genes were identified that are involved in the regulation of mitosis and chromosomal segregation as candidate RSL genes. Among these are cyclin A2 (CCNA2), the hMis18α and hMis18α (C21ORF45 and OIP5), borealin (CDCA8), KNL-1 (CASC5), MCAK (KIF2C), subunits of the APC/C complex (ANAPC1, ANAPC4, CDC16 and CDC27), SMC4 and the mitotic kinase PLK1 (Tables 1 and 2). Their depletion phenotypes are likely to be on-target effects as multiple shRNAs gave similar results (FIG. 10A).

[0281] The identification of many mitotic genes as RSL candidates indicate that Ras Mut cells might experience heightened mitotic stress. Indeed, despite having a faster doubling time (FIG. 8C) and a similar percentage of G2 cells when compared to DLD-1 Ras WT cells (26.1±3.3 vs. 26.7±4.5), DLD-1 Ras mutant cells show a 50% higher mitotic index, indicative of a slower mitotic progression (FIG. 10B). Furthermore, when released from metaphase block induced by the Eg5 kinesin inhibitor monastrol (Mayer et al., 1999), a significantly higher fraction of Ras Mut cells exhibit lagging chromosome in anaphase (FIG. 10C). To further explore the consequences of mitotic stress pharmacologically, the sensitivity of the Ras Mut and WT cells towards two inhibitors of mitotic spindle function (nocodazole and paclitaxel) was determined (Peterson and Mitchison, 2002). Whereas both the Ras Mut and WT cells show comparable sensitivity to the microtubule depolymerizer nocodazole (FIG. 17A), both DLD-1 and HCT116 Ras Mut cells show increased sensitivity to the microtubule stabilizer paclitaxel relative to their respective WT counterparts (FIG. 10D and FIG. 17B). Cell cycle analysis reveals that, at the synthetic lethal concentration of paclitaxel causes a strong G2/M arrest in Ras Mut cells but not in Ras WT cells that is attributed to a striking pro-metaphase block in the Ras mutant cells (FIGS. 10 E&F). Together these findings indicate that the Ras oncogene causes increased mitotic stress and renders the cell hypersensitive to perturbation of the mitotic machinery.

### Ras Mutant Cells are Hypersensitive to Inhibition of PLK1 Function

[0282] Polo-like kinase 1 (PLK1) plays a key role in mitosis (Barr et al., 2004; Petronczki et al., 2008). Its activity is often deregulated in cancer cells and inhibitors against PLK1 have been developed as potential cancer therapeutics (Strebhardt and Ullrich, 2006). Multiple shRNAs against PLK1 were discovered to show increased toxicity towards Ras Mut cells compared to Ras WT cells in both the DLD-1 and the HCT116 isogenic pairs (FIG. 11A). Furthermore, siRNAs against PLK1 also yielded enhanced toxicity towards Ras Mut cells (FIG. 18A).

[0283] To further confirm these results, the effect of BI-2536, a highly selective small molecule inhibitor of polo-like kinases, particularly PLK1 (Steegmaier et al., 2007; Lenart et al., 2007) was tested. An increased sensitivity of the Ras Mut cells towards BI-2536 in both the DLD-1 and HCT116 isogenic pairs was observed (FIG. 11B). The synthetic lethal effect of BI-2536 can be reproduced using either the competition assay (FIG. 11B) or by measuring the viability of Ras Mut and WT cells independently (FIG. 20), and was found to be strongest at approximately 25 nM in DLD-1 cells. The cell cycle distribution of DLD-1 cells was analyzed after treatment with either 25 nM or 50 nM of BI-2536 for one day. Whereas the cell cycle profile of Ras WT cells is only modestly affected, Ras Mut cells show a profound G2/M accumulation in the presence of BI-2536 (FIG. 11C). Careful analysis reveals that this G2/M accumulation in Ras Mut cells is due to a strong block of Ras Mut cells in prometaphase: whereas a substantial number of metaphase and anaphase cells could still be found among Ras WT cells in the presence of BI-2536, few such cells were found among the Ras Mut cells (FIG. 11D).

[0284] PLK1 functions at multiple stages during mitosis from mitotic entry all the way through cytokinesis (Petronczki et al., 2008). To investigate whether PLK1 inhibition delays mitotic entry in DLD-1 Ras Mut cells, cells were synchronized at the G2/M boundary using the CDK1 inhibitor RO-3306 (Vassilev et al., 2006) and released them into nocodazole with or without the presence of BI-2536 to trap mitotic cells. It was found that mitotic entry was faster for Ras Mut cells but was unaffected at the synthetic lethal concentration of BI-2536 in either Ras WT or Ras Mut cells (FIG. 11E). Next, mitotic cells synchronized in nocodazole were released to test their ability to complete mitosis in the presence of BI-2536. Whereas BI-2536 had a minimal effect on Ras WT cells in this respect, it caused a profound delay in mitotic exit in Ras Mut cells (FIG. 11F). This finding further supports the notion that Ras Mut cells are more dependent upon PLK1 activity for mitotic progression. The mitotic arrest of Ras Mut cells in BI-2536, however, was not sustained over time. Prolonged treatment with BI-2536 for 2 days results in an elevated sub-G1 population in Ras Mut cells, indicative of cell death (FIG. 11G).

[0285] PLK1 is transcriptionally upregulated in late S and in G2 phase, whereas its catalytic activation requires phosphorylation at Thr210 by the kinase Aurora-A at the G2/M transition (Jang et al., 2002; Seki et al., 2008; Macurek et al., 2008). Without wishing to be bound by theory, one explanation of the results would be that Ras Mut cells have lower PLK1 protein levels or activity during mitosis. Contrary to this model, the levels of both total and activated PLK1 protein are slightly elevated in Ras Mut cells during mitosis, particularly at the G2/M boundary (FIG. 18G). Thus the increased dependency of Ras Mut cells on PLK1 function is likely due to other causes rather than reduced PLK1 levels in the Ras Mut cells. Together these findings indicate that the Ras oncogene adversely affects mitotic progression and renders cells more dependent on PLK1 activity for proper mitosis progression.

### Ras Mutant Cells are Hypersensitive to APC/C and Proteasome Inhibition

[0286] Mitotic progression is critically controlled by the activity of the anaphase promoting complex/cyclosome (APC/C), an E3 ubiquitin ligase that promotes the orderly degradation of key mitotic proteins (Peters, 2006). Several APC/C subunits including APC1/ANAPC1, APC4/ANAPC4, Cdc16 and Cdc27 scored in the screen (Tables 1&2, FIG. 12A), suggesting that Ras Mut cells are more dependent on APC/C activity for mitotic progression. The activity of APC/C is inhibited by EMI1 prior to mitosis, until PLK1 phosphorylates EMI1 and targets it for degradation via the SCF (Reimann et al., 2001; Hansen et al., 2004; Di Fiore and Pines, 2007). The binding partner of EMI1, EVI5, on the other hand, blocks PLK1 phosphorylation of EMI1 and thereby antagonizes APC/C activation (Eldridge et al., 2006). Thus Ras Mut cells are more dependent on APC/C activity, and are also more sensitive to EMI1 or EVI5 overexpression. When exogenous EMI1 and EVI5 were retrovirally expressed in these cells, Ras Mut cells were specifically impaired (FIG. 12B). These results indicate that either APC/C activation might be reduced in Ras Mut cells or that these cells show a higher dependence on normal APC activity for survival. Consistent with these models, sub-phenotypic siRNA knockdown of APC/C subunits strongly synergizes with sub-phenotypic low concentrations of BI-2536 to confer synthetic lethality in DLD-1 Ras Mut cells (FIG. 12C).

[0287] Two steps in the central pathway identified in the screen require proteolysis. Both activation of the APC through EMI ubiquitination and APC/C targeted ubiquitination of mitotic proteins ultimately require proteasome activity for degradation. Importantly, the screen also identified shRNAs against several proteasome subunits including PSMA5, PSMB5 and PSMB6 (FIG. 12D). Furthermore, two structurally distinct small molecule inhibitors of the proteasome, MG132- and bortezomib (Velcade), both exhibit synthetic lethality with Ras Mut cells (FIG. 12E and FIG. 20). Without wishing to be bound by theory, Ras Mut cells are more sensitive to MG132- and bortezomib-induced G2/M arrest, which is consistent with a model that the hypersensitivity of Ras Mut cells to proteasome inhibition is in part due to mitotic defects, (FIG. 12F). Again this is due to a more profound prometaphase block of the Ras Mut cells in the presence of these drugs (FIG. 12G). Together these results indicate that the Ras oncogene interferes with the function of the APC/C and renders cells sensitive to further inhibition of this complex.

### The Mitotic Machinery as an Achilles' Heel for Ras Mutant Cancer Cells

[0288] Taken together, these results indicate that cancer cells with mutant Ras experience elevated mitotic stress and are more dependent on key mitotic proteins such as PLK1, the APC/C complex, the COP9 signalosome and the proteasome for proper mitotic progression (FIG. 13), It is also shown herein that targeting selected mitotic proteins can exacerbate this mitotic stress to selectively kill Ras mutant cancer cells. It is shown herein that small molecule inhibitors, which disrupt mitosis (e.g., paclitaxel, BI-2536, bortezomb (Velcade), MG132, etc.) all constitute synthetic lethality with Ras mutant cells. Transient treatment of DLD-1 cells for 24 hours with these drugs, which approximates the length of one cell cycle for these cells, is sufficient to selectively impair the viability of Ras Mut cells (FIG. 20). This indicates that many Ras Mut cells might not recover from their drug-induced mitotic arrest and fail to complete normal mitosis following the removal of these inhibitors.

[0289] To assess whether this mitotic stress might be specifically associated with the Ras oncogene, a potential synthetic lethal effect of paclitaxel, BI-2536, bortezomib and MG132 was tested in isogenic DLD1 and HCT116 cells for the PI3K oncogene (Samuels et al., 2005). In contrast to Ras Mut DLD-1 cells, DLD-1 PI3K Mut cells are more resistant to these inhibitors relative to DLD-1 PI3K WT cells. Furthermore, HCT116 PI3K Mut and WT cells showed very little difference when treated with these inhibitors (FIG. 21). These results indicate that the increased mitotic stress observed is specific for oncogeneic Ras and not for PI3K activation.

[0290] Although the detailed mechanisms by which the Ras oncogene affects the activity of various mitotic machineries remain to be elucidated, these data indicate that impaired APC/C function might be a critical oncogenic stress associated with Ras mutation (FIG. 13). Without wishing to bound by theory, Ras mutant cancer cells can benefit from increased APC/C activity. Support for this hypothesis comes from analysis of lung cancer tumor samples. The expression of the core mitotic RSL candidate genes and other genes directly associated with APC/C function (all APC/C subunits, EMI1, EVI5, Cdc20, Cdh1 and UbCH10) was analyzed and correlated with patient prognosis in a cohort of lung cancer samples (Shedden et al., 2008). As the mutation status of the Ras genes in these tumors is currently unknown but their transcriptional profiles are known, a Ras expression signature was first derived from a separate, smaller set of lung tumors whose Ras mutation status are known (Bhattacharjee et al., 2001). This Ras signature was applied to the cohort to stratify them as having positive, negative or neutral Ras signatures (FIG. 14A). 143 tumors were defined as having a strong Ras mutant signature (Ras signature +) and 116 as having a WT-Ras signature (Ras signature −). Three genes, COPS3, Cdc16 and EVI5, showed a correlation of expression level which is associated with prognosis in a manner that is also dependent on the tumor's Ras signature status. Lower expression of COPS3 and Cdc16, and higher expression of EVI5 (all of which are consistent with potentially decreased APC/C activity) are each associated with enhanced survival for patients bearing tumors with a positive Ras signature but have no prognostic value in patients bearing tumors with a negative Ras signature (FIG. 14B). When tumors are simultaneously investigated for all three gene signatures, those with lower COPS3 and Cdc16 together with higher EVI5 expression levels are associated with an enhancement of survival for patients bearing tumors that exhibit a positive Ras signature (FIG. 14C). These findings are consistent with the hypothesis that APC/C activity could present a limiting factor in Ras mutant cancer cells and present an attractive drug target for cancers with Ras mutation.

[0291] Using this pool-based shRNA platform in a genome-wide screen, candidate Ras synthetic lethal (RSL) genes of diverse functions were identified whose knockdown constituted synthetic lethality with the KRAS oncogene. Many of these RSL genes are implicated in Ras function for the first time. This study, together with previous analyses of the Ras pathway [Reviewed in (Karnoub and Weinberg, 2008)], indicate that a broad genetic network spanning multiple cellular functions are required to support the Ras oncogenic state. Many genes in this network could be exploited as potential therapeutic targets, as demonstrated by the synthetic lethal effect of their knockdown by RNAi.

### Mitotic Stress as a Hallmark of the Ras Oncogenic State

[0292] Multiple mitotic genes were identified whose knockdown constitutes synthetic lethality with mutant Ras in DLD-1 and HCT116 colorectal cancer cells. Among these is the centromeric hMis18 complex that functions to recruit centromere-specific histone CENP-A (Fujita et al., 2007), the kinetochore protein KNL-1, a member of the KNL-1/M is12/Ndc80 complex that promotes spindle attachment and proper chromosomal segregation (Cheeseman et al., 2004; Cheeseman et al., 2006), the microtubule depolymerizing kinesin MCAK that promotes the resolution of merotelic kinetochore attachment (Andrews et al., 2004; Lan et al., 2004; Kline-Smith et al., 2004), as well as the chromosomal passenger complex (Ruchaud et al., 2007), the APC/C (Peters, 2006) and the mitotic kinase PLK1 (Barr et al., 2004, Nat Rev Mol Cell Biol, 5, 429-40; Petronczki et al., 2008, Dev Cell, 14, 646-59), all of which play a multitude of roles in mitotic progression. This indicates that the Ras oncogene induces mitotic stress and renders the cells more dependent on the function of key mitotic proteins for survival. In agreement with these findings, it has been previously shown that mutant Ras can induce chromosome instability (Denko et al., 1994), and RNAi knockdown of the chromosomal passenger complex protein survivin and the kinesin-like protein TPX2 also selectively kill Ras mutant cells (Sarthy et al., 2007; Morgan-Lappe et al., 2007). Together these findings indicate that targeting selected components of the mitotic machinery can prove useful in treating Ras-driven cancers. Indeed, the data presented herein show that several pharmacological inhibitors of mitosis selectively impair the viability of Ras mutant cells. This study identifies a previously unappreciated role of Ras in regulating mitotic progression.

[0293] Without wishing to be bound by theory, the following mechanisms are proposed. Acute expression of mutant H-Ras can induce chromosomal instability within a single cell cycle (Denko et al., 1994), thus suggesting a potentially direct mechanism. Several reports have implicated the Ras/MAPK pathway in mitosis. It has been previously shown that in yeast Ras negatively regulates the kinetochore DASH complex (Li et al., 2005) and thus might influence spindle attachment. In mitotic Xenopus oocyte extract, MAPK activity is required for mitotic entry and the maintenance of the mitotic state, whereas its inactivation is required for mitotic exit (Wang et al., 2007; Guadagno and Ferrell, 1998). In mammalian cells, MAPK activity is require for G2/M transition (Wright et al., 1999), and activated Ras can accelerate mitotic entry (Knauf et al., 2006). Activated MAP kinase localizes to the mitotic kinetochore (Zecevic et al., 1998; Shapiro et al., 1998) and a hyperactive MAPK pathway can promote spindle checkpoint bypass (Eves et al., 2006). In support of this, MAP kinase has been shown to phosphorylate the substrate-recognition subunit of APC/C, Cdc20, and release it from the spindle checkpoint complex Mad2/BubR1 (Chung and Chen, 2003). Without wishing to be bound by theory Ras/MAPK signaling might affect the fidelity of the spindle checkpoint. The finding that Ras Mut cells are hypersensitive to the knockdown of KNL-1, MCAK and to paclitaxel would support this hypothesis. However, no hypersensitivity of Ras Mut cells to nocodazole was observed, and contrary to a mitotic checkpoint by-pass phenotype, a more profound prometaphase arrest was observed in Ras Mut cells when treated with paclitaxel or BI-2536.

[0294] This study also identified a novel genetic interaction between the Ras oncogene and the APC/C. In yeast, there is evidence that Ras can negatively regulate APC/C activity (Irniger et al., 2000). In unfertilized Xenopus oocytes arrested at metaphase of meiosis II, a signaling pathway involving Mos-MAPK, p96RSK activates the APC/C inhibitor Erp1/Emi2 to inhibit APC/C activation (Inoue et al., 2007; Nishiyama et al., 2007). The mechanism by which this occurs in mammalian cells during mitosis is unknown. Importantly, this study indicates that APC/C itself might be an attractive drug target—small molecule inhibitors targeting the E3 ubiquitin ligase activity of APC/C might cause synthetic lethality either alone or in combination with PLK1 inhibitors in Ras mutant tumors.

[0295] Many RSL genes identified are growth and survival genes. It is likely that the synthetic lethality conferred by their respective shRNAs results from a partial knockdown of their function. In the case of PLK1, this is supported by the observation that its inhibitor BI-2536 exhibits Ras synthetic lethality at concentrations below that needed to cause complete mitotic arrest. Without wishing to be bound by theory, such heightened dependency of Ras mutant cells on essential gene function could therefore reflect a critical fitness cost associated with oncogenic stress. Indeed, this study demonstrates that therapeutic strategies aim at suppressing the Ras oncogenic pathway directly (e.g. RNAi against Ras), inhibiting the stress support pathways protecting the cancer cells from oncogenic stress (e.g. RNAi and inhibitors against the proteasome and the APC/C), or enhancing the stress phenotype of cancer cells (e.g. paclitaxel) could all selectively impair the viability of Ras mutant cancer cells.

[0296] The approach described herein enables the rapid identification of functional vulnerabilities in cancer cells for therapeutic exploitation. Based on this genetic analysis, a number of small molecule inhibitors have been identified to be potentially useful for treating tumors with Ras mutations. Two of these, the microtubule stabilizer paclitaxel and the proteasome inhibitor bortezomib, have already been approved for the treatment of certain types of cancers. The third agent, the PLK1 inhibitor BI-2536, is currently undergoing phase I clinical trials (Mross et al., 2008).

[0297] The present study illustrates the potential rapidity by which synthetic lethality analysis could be translated into better therapeutic strategies. Complementary to the physical mapping of cancer genomes, functional approaches such as RNAi screen can identify genetic dependencies of cancer cells regardless of the mutational status of the gene of interest. Indeed, many candidate RSL genes identified have not been found to be mutated in tumors and are unlikely to be oncogenes themselves. The concept of “non-oncogene addiction” has recently been proposed to describe the extensive dependency of cancer cells on the function of diverse networks of genes—many of which are neither mutated or oncogenic—for their growth and survival (Solimini et al., 2007). This study provides a glimpse of the landscape of non-oncogene addiction and indicates this is an area that is likely to shed new light on the mechanisms of tumorigenesis and presents new opportunities for cancer therapeutics.

### Materials and Methods

[0298] shRNA Library Screen and Microarray Hybridization

[0299] The pool-based shRNA screen using half-hairpin (HH) barcode deconvolution was carried out as described before (Schlabach et al., 2008). Briefly, DLD-1 Ras mutant (Mut) or wildtype (WT) cells were infected with pools of retroviral shRNA at a representation of ˜1,000 and a multiplicity of infection (MOI) of ˜1. At day 3 post infection an initial, population-doubling 0 (PD0) sample was taken. The rest of the population were selected with puromycin to remove the minority of uninfected cells and propagated in culture for an additional 17 doublings before the final, PD17 sample was taken. For each passage a minimal representation of 1000 was maintained. The genomic shRNA library containing 74,905 retroviral shRNAs targeting 32,293 unique human gene transcripts (including 19,542 RefSeqs) were screened as 6 pools of ˜13,000 shRNAs per pool in independent triplicates. For each pair of corresponding PD0 and PD17 samples, shRNA HH barcode was PCR-recovered from genomic samples and labeled with Cy5 and Cy3 dyes, respectively. The labeled HH barcode amplicons were competitively hybridized to a microarray containing the corresponding probes. Custom microarrays with HH barcode probe sequences were from Roche Nimblegen. Array hybridization and scanning protocols were based on manufacturer's instructions. The genome-wide mir30 shRNA library was expressed using the retroviral vector MSCV-PM (Schlabach et al., 2008) and is available through Open Biosystems Inc.

[0300] Statistical and Bioinformatics Analysis of shRNA Screen

[0301] Only informative probes (i.e. those with raw signal 2-fold above negative control probes) were used for analysis. The change in the relative abundance of each shRNA in the library over time is measured using the normalized Cy3/Cy5 ratio of its probe signal (Schlabach et al., 2008). A log₂ Cy3/Cy5 ratio of <0 indicates the shRNA is depleted in the population over time. To identify shRNAs that are synthetically lethal with mutant Ras, the mean log₂ Cy3/Cy5 ratios of the Ras Mut triplicates were compared to that of the Ras WT triplicates to derive the log₂ ratio difference. A p-value of the difference between the two triplicates was calculated using the t-test. A extended list of candidate shRNAs (Table 1) were obtained by using a set of cutoff that requires the Ras Mut log 2 ratio≦−0.7, Ras WT log ratio≧−2, the difference in log₂ ratios between Ras Mut and Ras WT to be ≦−0.7, and the p-value to be ≦0.3. By reducing the p-value to ≦0.1 a shorter candidate list is obtained (Table 2). As the overall validation rate is relatively low (26.7%), the statistical analysis was used mainly as a guide to prioritize candidates for further test and validation. Functional categorization of candidate RSL genes was done using PANTHER (Thomas et al., 2003).

### Analysis of Human Lung Tumor Profiles

[0302] A gene signature of KRAS mutant versus KRAS wild-type tumors was defined, using a published dataset of 84 lung adenocarcimos from a study by Bhattacharjee et al. (Bhattacharjee et al., 2001) for which the KRAS mutation status of each tumor was known (genes with P<0.01, two-sided t-test were selected). This KRAS gene signature was applied to analyze a gene expression profile dataset of 442 human lung adenocarcinomas by Shedden et al. (Shedden et al., 2008). Each tumor was scored for manifestation of the Ras pathway by the following. The Shedden tumor profiles were generated among four laboratories, and so within each laboratory subset, expression values for each gene were normalized to standard deviations from the mean. Within each Shedden tumor profile, the average of the genes high (“up”) in the Bhattacharjee KRAS signature were compared with the average of the genes low (“down”) in the signature: tumors with higher expression of the “up” genes as compared to the “down” genes (P<0.01, t-test) were classified as showing Ras pathway manifestation (“Ras signature+”); tumors with higher expression of the “down” genes (P<0.01) were classified as not showing Ras pathway manifestation (“Ras signature-”); tumors that were intermediate between the above two groups were not used in subsequent analyses.

[0303] Within the Shedden “Ras signature+” tumors (N=143), tumors with expression levels greater than the median for the given candidate RSL gene were compared with the rest of the tumors in the subset, using Kaplan-Meier analysis for time to patient death. In addition, univariate Cox analysis evaluated the expression of the given gene as a continuous variable for correlation with outcome. The same Kaplan-Meier and Cox analyses were also carried out using the Shedden “Ras signature-” tumors (N=116).

### Competition Assay

[0304] The competition assay used to test candidate genes from the screen was modified from a previous protocol (Torrance et al., 2001; Smogorzewska et al., 2007) and was carried out in 96-well plates in independent triplicates. For this assay, 1,000 each of GFP-labeled Ras Mut and unlabeled Ras WT cells were seeded in each well. For retroviral shRNA infection, cells were infected at an MOI of 1-5, selected for 3 days with puromycin and propagated for an additional 4-5 days before analyzed by FACS. An shRNA targeting firefly luciferase (shRNA-FF) was used as the negative control. For siRNA transfection, cells were transfected with siGenome siRNAs (Dharmacon) using Lipofectamine RNAiMAX (InVitrogen) and analyzed by FACS 5-6 days post transfection An siRNA targeting luciferase (Luc) was used as the negative control. For drug treatment, cells were treated with drugs for 4-5 days prior to FACS analysis. Untreated wells were used as negative controls. To obtain normalized fitness of Ras Mut cells that can be compared across experiments, the percentage of Ras Mut cells in each sample was normalized to that in the control samples of that experiment. This results in a “normalized mutant fitness” that ranges from 0% (no Ras mut cells left in population) to 100% (same number of Ras mut cells as control wells).

### Cell Cycle Analysis

[0305] For cell cycle analysis, cells were ethanol fixed and stained with PI and analyzed using a BD LSR II FACS analyzer (BD Bioscience). Data analysis was carried out with BD FACS Diva and FlowJo softwares. Cell cycle synchronization by double thymidine block was based on a previous protocol (Steegmaier et al., 2007). Briefly, cells were arrested with two rounds of 20-hour thymidine (2.5 mM) treatment approximately 12 hours apart and released into mitosis. To trap cells at different stages of mitosis, cells release from double thymidine block were released into the CDK1 inhibitor RO-3306 (10 μM) (Vassilev et al., 2006), the PLK1 inhibitor BI-2536 (100 nM) (Steegmaier et al., 2007) and the microtubule depolymerizer nocodazle (100 ng/ml). For one-step arrest in G2/M or in prometaphase, cells were treated overnight with either RO-3306 (10 μM) or the Eg5 kinesin inhibitor monastrol (100 μM), respectively. For mitotic entry experiments, cells were synchronized in RO-3306 (10 uM) overnight prior to release. For mitotic release experiments, cells were released from overnight synchronization in RO-3306 (10 uM) into nocodazole (200 ug/ml) for 4 hours and mitotic cells were collected by mitotic shake-off. Cells were then release by washing out the nocodazole. For the analysis of lagging chromosomes and mitotic index by microscopy, cells seeded onto coverslips were arrested in mitosis with 100 μM monastrol for 16 hours. Cells were washed and released into fresh media and were fixed at ten minute intervals for two hours in PHEM buffer+2% formaldehyde+0.5% triton-X100. Cells were immunostained with DAPI to visualized DNA and antibodies to phospho-histone H3 Ser10 (pH3S10) and to α-tubulin to identify mitotic cells at different stages. Independent triplicates with >100 cells per replicate were analyzed. For measuring mitotic index by FACS, cells were trypsinized, fixed with ethanol and stained with PI and pH3S10 antibody.

### Cell Culture, Molecular Biology and Reagents

[0306] The DLD-1 and HCT116 isogenic cells were kind gifts from Dr. Bert Vogelstein (Johns Hopkins University School of Medicine) and were maintained in McCoy's 5A media supplemented with 10% FBS and antibiotics. For proliferation assays, 10,000 cells were seeded in each well of a 24-well plate and cell number was measured using CellTiterGLO (Promega). For adherent colony assays, 1000 cells were seeded in each well of a 6-well plate and colonies were counted 10 days later by Coomassie staining. For anchorage independent colony assays, 1000 cells were seeded in each well of a 6-well plate in media containing 0.35% low-melting point agarose and colonies were counted 3 weeks later by crystal violet staining. The PCR primers used to amplify HH barcodes from genomic DNA samples are JH353F 5′-TAGTGAAGCCACAGATGTA-3′ and HHR2L 5′-ATGTATCAAAGAGATAGCAAGGTATTCAG-3′. BI-2536 was a kind gift from Dr. Nathanael Gray (Harvard Medical School and Dana Faber Cancer Institute). Paclitaxel, nocodazole, MG132 and monastrol were from Sigma-Aldrich. RO-3306 was from EMD Calbiochem. Bortezomib was from LC Laboratories. Rabbit antibody against phospho-PLK1 T210 was from Abcam. Rabbit phosphoH3-S10 antibody was from Covance. Mouse antibodies against PLK1, K-Ras and tubulin were from Santa Cruz Biotechnologies. Rabbit anti-COPS4 antibody was from Bethyl Laboratories.

### REFERENCES

[0307] S1. C. Lee, J. S. Kim, T. Waldman, Cancer Res. 64, 6906 (2004).
[0308] S2. G. Keller, M. Kennedy, T. Papayannopoulou, M. V. Wiles, Mol. Cell. Biol. 13, 473 (1993).
[0309] S3. E. Robertson, A. Bradley, M. Kuehn, M. Evans, Nature 323, 445 (1986).
[0310] S4. M. Z. Li, S. J. Elledge, Nat. Genet. 37, 311 (2005).
[0311] S5. V. G. Tusher, R. Tibshirani, G. Chu, Proc. Natl. Acad. Sci. USA 98, 5116 (2001).

Lengthy table referenced here
US20110081362A1-20110407-T00001
Please refer to the end of the specification for access instructions.

Lengthy table referenced here
US20110081362A1-20110407-T00002
Please refer to the end of the specification for access instructions.

Lengthy table referenced here
US20110081362A1-20110407-T00003
Please refer to the end of the specification for access instructions.

Lengthy table referenced here
US20110081362A1-20110407-T00004
Please refer to the end of the specification for access instructions.

Lengthy table referenced here
US20110081362A1-20110407-T00005
Please refer to the end of the specification for access instructions.

Lengthy table referenced here
US20110081362A1-20110407-T00006
Please refer to the end of the specification for access instructions.

Lengthy table referenced here
US20110081362A1-20110407-T00007
Please refer to the end of the specification for access instructions.

Lengthy table referenced here
US20110081362A1-20110407-T00008
Please refer to the end of the specification for access instructions.

Lengthy table referenced here
US20110081362A1-20110407-T00009
Please refer to the end of the specification for access instructions.

LENGTHY TABLES
The patent application contains a lengthy table section. A copy of the table is available in electronic form from the USPTO web site (http://seqdata.uspto.gov/?pageRequest=docDetail&DocID=US20110081362A1). An electronic copy of the table will also be available from the USPTO upon request and payment of the fee set forth in 37 CFR 1.19(b)(3).

The application's sequence listing, which the Patent Office published only in electronic form, follows.

SEQUENCE LISTING (10410 sequences)

SEQ ID NO: 1 - DNA, 19 bp, Artificial Sequence
  Description of Artificial Sequence: Synthetic primer
tagtgaagccacagatgta

SEQ ID NO: 2 - DNA, 41 bp, Artificial Sequence
  Description of Artificial Sequence: Synthetic primer
taatacgactcactatagggagtgatttaatttataccatt

SEQ ID NO: 3 - DNA, 18 bp, Artificial Sequence
  Description of Artificial Sequence: Synthetic primer
cctcccctacccggtaga

SEQ ID NO: 4 - DNA, 19 bp, Artificial Sequence
  Description of Artificial Sequence: Synthetic primer
tagtgaagccacagatgta

SEQ ID NO: 5 - DNA, 29 bp, Artificial Sequence
  Description of Artificial Sequence: Synthetic primer
atgtatcaaagagatagcaaggtattcag

SEQ ID NO: 6 - RNA, 71 nt, Artificial Sequence
  Description of Artificial Sequence: Synthetic oligonucleotide
  modified_base (5)..(26): a, c, u, g, unknown or other
  modified_base (46)..(67): a, c, u, g, unknown or other
cgggnnnnnnnnnnnnnnnnnnnnnnuagugaagccacagauguannnnnnnnnnnnnnnnnnnnnnugcc

SEQ ID NO: 7 - DNA, 22 bp, Artificial Sequence
  Description of Artificial Sequence: Synthetic oligonucleotide
taatgaagggaggattcatgca

SEQ ID NO: 8 - DNA, 22 bp, Artificial Sequence
  Description of Artificial Sequence: Synthetic oligonucleotide
atagactttcactatggctggt

SEQ ID NO: 9 - DNA, 22 bp, Artificial Sequence
  Description of Artificial Sequence: Synthetic oligonucleotide
ttgtatctcaacaccgtctgca

SEQ ID NO: 10 - DNA, 22 bp, Artificial Sequence
  Description of Artificial Sequence: Synthetic oligonucleotide
tttaagaagcgaagtgttgcca

SEQ ID NO: 11 - DNA, 22 bp, Artificial Sequence
  Description of Artificial Sequence: Synthetic oligonucleotide
tatatgtctcgatttctcagga

SEQ ID NO: 12 - DNA, 22 bp, Artificial Sequence
  Description of Artificial Sequence: Synthetic oligonucleotide
tagacttaaaccaaagggtcct

SEQ ID NO: 13 - DNA, 22 bp, Artificial Sequence
  Description of Artificial Sequence: Synthetic oligonucleotide
atatgcatgttcaccatctggc

SEQ ID NO: 14 - DNA, 22 bp, Artificial Sequence
  Description of Artificial Sequence: Synthetic oligonucleotide
atcttgtagaagatggtctcga

SEQ ID NO: 15 - DNA, 22 bp, Artificial Sequence
  Description of Artificial Sequence: Synthetic oligonucleotide
ttagattatccctgaacagcct

SEQ ID NO: 16 - DNA, 22 bp, Artificial Sequence
  Description of Artificial Sequence: Synthetic oligonucleotide
ataaaggcactgttgatgtggc

SEQ ID NO: 17 - DNA, 22 bp, Artificial Sequence
  Description of Artificial Sequence: Synthetic oligonucleotide
ttcaacttcagcaggctgcggt

SEQ ID NO: 18 - DNA, 22 bp, Artificial Sequence
  Description of Artificial Sequence: Synthetic oligonucleotide
tttatccagagtatctgctcca

SEQ ID NO: 19 - DNA, 22 bp, Artificial Sequence
  Description of Artificial Sequence: Synthetic oligonucleotide
tttaggaaagcctgtggtccca

SEQ ID NO: 20 - DNA, 22 bp, Artificial Sequence
  Description of Artificial Sequence: Synthetic oligonucleotide
atactgaacaactctgacaggc

SEQ ID NO: 21 - DNA, 22 bp, Artificial Sequence
  Description of Artificial Sequence: Synthetic oligonucleotide
aagagaagggaggtgagttggt

SEQ ID NO: 22 - DNA, 22 bp, Artificial Sequence
  Description of Artificial Sequence: Synthetic oligonucleotide
tttgtctttcatgatatccgct

SEQ ID NO: 23 - DNA, 22 bp, Artificial Sequence
  Description of Artificial Sequence: Synthetic oligonucleotide
atagtagaccctccagaaagca

SEQ ID NO: 24 - DNA, 22 bp, Artificial Sequence
  Description of Artificial Sequence: Synthetic oligonucleotide
taaaccttgagcgtacaaagtc

SEQ ID NO: 25 - DNA, 22 bp, Artificial Sequence
  Description of Artificial Sequence: Synthetic oligonucleotide
atgtcagggctatgtggttcct

SEQ ID NO: 26 - DNA, 22 bp, Artificial Sequence
  Description of Artificial Sequence: Synthetic oligonucleotide
taatgatctgggaacctagccc

SEQ ID NO: 27 - DNA, 22 bp, Artificial Sequence
  Description of Artificial Sequence: Synthetic oligonucleotide
tttaacttccacagtcttgcct

SEQ ID NO: 28 - DNA, 22 bp, Artificial Sequence
  Description of Artificial Sequence: Synthetic oligonucleotide
ttcagtttacacgttagggctt

SEQ ID NO: 29 - DNA, 22 bp, Artificial Sequence
  Description of Artificial Sequence: Synthetic oligonucleotide
ttggtttcttaatattacggca

SEQ ID NO: 30 - DNA, 22 bp, Artificial Sequence
  Description of Artificial Sequence: Synthetic oligonucleotide
atagtggagtagtcggtgggcg

SEQ ID NO: 31 - DNA, 22 bp, Artificial Sequence
  Description of Artificial Sequence: Synthetic oligonucleotide
atacagctcctcattgtctcgg

SEQ ID NO: 32 - DNA, 22 bp, Artificial Sequence
  Description of Artificial Sequence: Synthetic oligonucleotide
ttgtactgagataggctgagga

SEQ ID NO: 33 - DNA, 22 bp, Artificial Sequence
  Description of Artificial Sequence: Synthetic oligonucleotide
tttaaagccaccaagaatagct

SEQ ID NO: 34 - DNA, 22 bp, Artificial Sequence
  Description of Artificial Sequence: Synthetic oligonucleotide
ttcacaaccgaattggtgtggg

SEQ ID NO: 35 - DNA, 22 bp, Artificial Sequence
  Description of Artificial Sequence: Synthetic oligonucleotide
attgtaacccagggaggaggcg

SEQ ID NO: 36 - DNA, 22 bp, Artificial Sequence
  Description of Artificial Sequence: Synthetic oligonucleotide
ttctattatgggtataggtcct

SEQ ID NO: 37 - DNA, 22 bp, Artificial Sequence
  Description of Artificial Sequence: Synthetic oligonucleotide
gaagaatatcctcttgcctgcg

SEQ ID NO: 38 - DNA, 22 bp, Artificial Sequence
  Description of Artificial Sequence: Synthetic oligonucleotide
aagtacttgaagcttcgcacga

SEQ ID NO: 39 - DNA, 22 bp, Artificial Sequence
  Description of Artificial Sequence: Synthetic oligonucleotide
tttgttgaaaggtttgagtggg

SEQ ID NO: 40 - DNA, 22 bp, Artificial Sequence
  Description of Artificial Sequence: Synthetic oligonucleotide
tttaattgcgaacttgagggca

SEQ ID NO: 41 - DNA, 22 bp, Artificial Sequence
  Description of Artificial Sequence: Synthetic oligonucleotide
ttagctcttagggaggagaggt

SEQ ID NO: 42 - DNA, 22 bp, Artificial Sequence
  Description of Artificial Sequence: Synthetic oligonucleotide
tagtcccatcagcattcttggg

SEQ ID NO: 43 - DNA, 22 bp, Artificial Sequence
  Description of Artificial Sequence: Synthetic oligonucleotide
ttcctctatccagtcaattggg

SEQ ID NO: 44 - DNA, 22 bp, Artificial Sequence
  Description of Artificial Sequence: Synthetic oligonucleotide
attcatcttcacagagactgcc

SEQ ID NO: 45 - DNA, 22 bp, Artificial Sequence
  Description of Artificial Sequence: Synthetic oligonucleotide
attaccaacatgagttgctggc

SEQ ID NO: 46 - DNA, 22 bp, Artificial Sequence
  Description of Artificial Sequence: Synthetic oligonucleotide
tattggttgctgctagactcgc

SEQ ID NO: 47 - DNA, 22 bp, Artificial Sequence
  Description of Artificial Sequence: Synthetic oligonucleotide
ttcaattcgagttattactcca

SEQ ID NO: 48 - DNA, 22 bp, Artificial Sequence
  Description of Artificial Sequence: Synthetic oligonucleotide
tttggttgggagacaacttggt

SEQ ID NO: 49 - DNA, 22 bp, Artificial Sequence
  Description of Artificial Sequence: Synthetic oligonucleotide
tatatgaacacaagaaagtgct

SEQ ID NO: 50 - DNA, 22 bp, Artificial Sequence
  Description of Artificial Sequence: Synthetic oligonucleotide
aagaacttccatagtggctgga

SEQ ID NO: 51 - DNA, 22 bp, Artificial Sequence
  Description of Artificial Sequence: Synthetic oligonucleotide
atttgaagagatttgggacctg

SEQ ID NO: 52 - DNA, 22 bp, Artificial Sequence
  Description of Artificial Sequence: Synthetic oligonucleotide
attgtgaataatgaagtatcct

SEQ ID NO: 53 - DNA, 22 bp, Artificial Sequence
  Description of Artificial Sequence: Synthetic oligonucleotide
aatttctagtccatgctaagcg

SEQ ID NO: 54 - DNA, 22 bp, Artificial Sequence
  Description of Artificial Sequence: Synthetic oligonucleotide
aatagacatatccatggtgcct

SEQ ID NO: 55 - DNA, 22 bp, Artificial Sequence
  Description of Artificial Sequence: Synthetic oligonucleotide
tttatgcaaacagttaaatgct

SEQ ID NO: 56 - DNA, 22 bp, Artificial Sequence
  Description of Artificial Sequence: Synthetic oligonucleotide
tattagtaatcgtttctgtcca

SEQ ID NO: 57 - DNA, 22 bp, Artificial Sequence
  Description of Artificial Sequence: Synthetic oligonucleotide
tacttcttgcagtaagcctcca

SEQ ID NO: 58 - DNA, 22 bp, Artificial Sequence
  Description of Artificial Sequence: Synthetic oligonucleotide
atacaatggaatacagattgct

SEQ ID NO: 59 - DNA, 22 bp, Artificial Sequence
  Description of Artificial Sequence: Synthetic oligonucleotide
tatactaaagacaaaggcagct

SEQ ID NO: 60 - DNA, 22 bp, Artificial Sequence
  Description of Artificial Sequence: Synthetic oligonucleotide
atatttctaggtgaaacaagct

SEQ ID NO: 61 - DNA, 22 bp, Artificial Sequence
  Description of Artificial Sequence: Synthetic oligonucleotide
ttgtaggatctcatacgacgtt

SEQ ID NO: 62 - DNA, 22 bp, Artificial Sequence
  Description of Artificial Sequence: Synthetic oligonucleotide
tttctttccttggttagacggc

SEQ ID NO: 63 - DNA, 22 bp, Artificial Sequence
  Description of Artificial Sequence: Synthetic oligonucleotide
attattgtccttgtccagtgct

SEQ ID NO: 64 - DNA, 22 bp, Artificial Sequence
  Description of Artificial Sequence: Synthetic oligonucleotide
ttacattcactgattaactcct

SEQ ID NO: 65 - DNA, 22 bp, Artificial Sequence
  Description of Artificial Sequence: Synthetic oligonucleotide
aagagttcacaatttcaaggct

SEQ ID NO: 66 - DNA, 22 bp, Artificial Sequence
  Description of Artificial Sequence: Synthetic oligonucleotide
ttagggttgtaattagacaggc

SEQ ID NO: 67 - DNA, 22 bp, Artificial Sequence
  Description of Artificial Sequence: Synthetic oligonucleotide
ttatgagtactggttgtttcgc

SEQ ID NO: 68 - DNA, 22 bp, Artificial Sequence
  Description of Artificial Sequence: Synthetic oligonucleotide
ctttattgggatgttagtaggg

SEQ ID NO: 69 - DNA, 22 bp, Artificial Sequence
  Description of Artificial Sequence: Synthetic oligonucleotide
ttgatgcggctgatgagttccc

SEQ ID NO: 70 - DNA, 22 bp, Artificial Sequence
  Description of Artificial Sequence: Synthetic oligonucleotide
tataatgatcctcatataacca

SEQ ID NO: 71 - DNA, 22 bp, Artificial Sequence
  Description of Artificial Sequence: Synthetic oligonucleotide
tagtgcaatcatttctgctggc

SEQ ID NO: 72 - DNA, 22 bp, Artificial Sequence
  Description of Artificial Sequence: Synthetic oligonucleotide
ttagacttgagatctcggtgga

SEQ ID NO: 73 - DNA, 22 bp, Artificial Sequence
  Description of Artificial Sequence: Synthetic oligonucleotide
atttattgtgaaagctcgtggg

SEQ ID NO: 74 - DNA, 22 bp, Artificial Sequence
  Description of Artificial Sequence: Synthetic oligonucleotide
ttacgaagagactgaagcccta

SEQ ID NO: 75 - DNA, 22 bp, Artificial Sequence
  Description of Artificial Sequence: Synthetic oligonucleotide
tataacccactcagcatttggg

SEQ ID NO: 76 - DNA, 22 bp, Artificial Sequence
  Description of Artificial Sequence: Synthetic oligonucleotide
atattgtgtttcctctctcggt

SEQ ID NO: 77 - DNA, 22 bp, Artificial Sequence
  Description of Artificial Sequence: Synthetic oligonucleotide
atctttggaggtaatctttcgc

SEQ ID NO: 78 - DNA, 22 bp, Artificial Sequence
  Description of Artificial Sequence: Synthetic oligonucleotide
taagtctagagaagaagtccct

SEQ ID NO: 79 - DNA, 22 bp, Artificial Sequence
  Description of Artificial Sequence: Synthetic oligonucleotide
ttaagtctagagaagaagtccc

SEQ ID NO: 80 - DNA, 22 bp, Artificial Sequence
  Description of Artificial Sequence: Synthetic oligonucleotide
tattcttggagattgagatgct

SEQ ID NO: 81 - DNA, 22 bp, Artificial Sequence
  Description of Artificial Sequence: Synthetic oligonucleotide
gaccactttaagaagcactgca

SEQ ID NO: 82 - DNA, 22 bp, Artificial Sequence
  Description of Artificial Sequence: Synthetic oligonucleotide
atatacatagcaaacatgaccg

SEQ ID NO: 83 - DNA, 22 bp, Artificial Sequence
  Description of Artificial Sequence: Synthetic oligonucleotide
atttgtaaagtgatgttcctct

SEQ ID NO: 84 - DNA, 22 bp, Artificial Sequence
  Description of Artificial Sequence: Synthetic oligonucleotide
ttagccttggtctgtgtcactg

SEQ ID NO: 85 - DNA, 22 bp, Artificial Sequence
  Description of Artificial Sequence: Synthetic oligonucleotide
tagcaaagagacattgtatcct

SEQ ID NO: 86 - DNA, 22 bp, Artificial Sequence
  Description of Artificial Sequence: Synthetic oligonucleotide
tttagactcaacatacatggtc

SEQ ID NO: 87 - DNA, 22 bp, Artificial Sequence
  Description of Artificial Sequence: Synthetic oligonucleotide
aatttcaaagaaatactgacca

SEQ ID NO: 88 - DNA, 22 bp, Artificial Sequence
  Description of Artificial Sequence: Synthetic oligonucleotide
ttacttattcttattaagcgcc

SEQ ID NO: 89 - DNA, 22 bp, Artificial Sequence
  Description of Artificial Sequence: Synthetic oligonucleotide
attaagcgccagctttaatgct

SEQ ID NO: 90 - DNA, 22 bp, Artificial Sequence
  Description of Artificial Sequence: Synthetic oligonucleotide
aatcttctcgatctcatcagcc

SEQ ID NO: 91 - DNA, 22 bp, Artificial Sequence
  Description of Artificial Sequence: Synthetic oligonucleotide
aagaactcttataatggagcct

SEQ ID NO: 92 - DNA, 22 bp, Artificial Sequence
  Description of Artificial Sequence: Synthetic oligonucleotide
ctgcaataccatttaatcacgt

SEQ ID NO: 93 - DNA, 22 bp, Artificial Sequence
  Description of Artificial Sequence: Synthetic oligonucleotide
atagtccatggtgttggcgctg

SEQ ID NO: 94 - DNA, 22 bp, Artificial Sequence
  Description of Artificial Sequence: Synthetic oligonucleotide
aatcactggttcttggcatggg

SEQ ID NO: 95 - DNA, 22 bp, Artificial Sequence
  Description of Artificial Sequence: Synthetic oligonucleotide
atgtaatctgtgagtagtgcgt

SEQ ID NO: 96 - DNA, 22 bp, Artificial Sequence
  Description of Artificial Sequence: Synthetic oligonucleotide
tttaactgtaggatcagctccg

SEQ ID NO: 97 - DNA, 22 bp, Artificial Sequence
  Description of Artificial Sequence: Synthetic oligonucleotide
taagtcttggatataaactggc

SEQ ID NO: 98 - DNA, 22 bp, Artificial Sequence
  Description of Artificial Sequence: Synthetic oligonucleotide
aatctccaatacttcatctgcc

SEQ ID NO: 99 - DNA, 22 bp, Artificial Sequence
  Description of Artificial Sequence: Synthetic oligonucleotide
ttactaactctgtgtagcccgt

SEQ ID NO: 100 - DNA, 22 bp, Artificial Sequence
  Description of Artificial Sequence: Synthetic oligonucleotide
aagagtcatcaaagagaaggca

SEQ ID NO: 101 - DNA, 22 bp, Artificial Sequence
  Description of Artificial Sequence: Synthetic oligonucleotide
ttattgctacattccagtgcct

SEQ ID NO: 102 - DNA, 22 bp, Artificial Sequence
  Description of Artificial Sequence: Synthetic oligonucleotide
ttctttgagaacttgtccagca

SEQ ID NO: 103 - DNA, 22 bp, Artificial Sequence
  Description of Artificial Sequence: Synthetic oligonucleotide
ttgagcaagagaacagattgct

SEQ ID NO: 104 - DNA, 22 bp, Artificial Sequence
  Description of Artificial Sequence: Synthetic oligonucleotide
taagtttctgagattgtatgct

SEQ ID NO: 105 - DNA, 22 bp, Artificial Sequence
  Description of Artificial Sequence: Synthetic oligonucleotide
tagatttgggccatctgcaggg

SEQ ID NO: 106 - DNA, 22 bp, Artificial Sequence
  Description of Artificial Sequence: Synthetic oligonucleotide
tataagtagtctgtggtctggc

SEQ ID NO: 107 - DNA, 22 bp, Artificial Sequence
  Description of Artificial Sequence: Synthetic oligonucleotide
atatagatgctgatgaggaccc

SEQ ID NO: 108 - DNA, 22 bp, Artificial Sequence
  Description of Artificial Sequence: Synthetic oligonucleotide
ttaccctctgatatgatgccca

SEQ ID NO: 109 - DNA, 22 bp, Artificial Sequence
  Description of Artificial Sequence: Synthetic oligonucleotide
ttattacagtccacagtctgct

SEQ ID NO: 110 - DNA, 22 bp, Artificial Sequence
  Description of Artificial Sequence: Synthetic oligonucleotide
aatcatgtcatccttctgggct

SEQ ID NO: 111 - DNA, 22 bp, Artificial Sequence
  Description of Artificial Sequence: Synthetic oligonucleotide
tttatcttggttgacagctcgt

SEQ ID NO: 112 - DNA, 22 bp, Artificial Sequence
  Description of Artificial Sequence: Synthetic oligonucleotide
tatatttatcctctggcacggg

SEQ ID NO: 113 - DNA, 22 bp, Artificial Sequence
  Description of Artificial Sequence: Synthetic oligonucleotide
tataaatctcccagctgagcca

SEQ ID NO: 114 - DNA, 22 bp, Artificial Sequence
  Description of Artificial Sequence: Synthetic oligonucleotide
tattggcaaagtactccatgca

SEQ ID NO: 115 - DNA, 22 bp, Artificial Sequence
  Description of Artificial Sequence: Synthetic oligonucleotide
taaagggatctagggcttcggc

SEQ ID NO: 116 - DNA, 22 bp, Artificial Sequence
  Description of Artificial Sequence: Synthetic oligonucleotide
taatagttgcgatcactttccg

SEQ ID NO: 117 - DNA, 22 bp, Artificial Sequence
  Description of Artificial Sequence: Synthetic oligonucleotide
ttaatcatcatctggaaatcgt

SEQ ID NO: 118 - DNA, 22 bp, Artificial Sequence
  Description of Artificial Sequence: Synthetic oligonucleotide
aagtagcaggtgcttctctgct

SEQ ID NO: 119 - DNA, 22 bp, Artificial Sequence
  Description of Artificial Sequence: Synthetic oligonucleotide
gatgtactgcactttcagacgc

SEQ ID NO: 120 - DNA, 22 bp, Artificial Sequence
  Description of Artificial Sequence: Synthetic oligonucleotide
atctttaaactgctgataccga

SEQ ID NO: 121 - DNA, 22 bp, Artificial Sequence
  Description of Artificial Sequence: Synthetic oligonucleotide
atttccgactgaagagtgagcc

SEQ ID NO: 122 - DNA, 22 bp, Artificial Sequence
  Description of Artificial Sequence: Synthetic oligonucleotide
atagacttgccctcagacagcg

SEQ ID NO: 123 - DNA, 22 bp, Artificial Sequence
  Description of Artificial Sequence: Synthetic oligonucleotide
atttaactccacaatccttgca

SEQ ID NO: 124 - DNA, 22 bp, Artificial Sequence
  Description of Artificial Sequence: Synthetic oligonucleotide
tatagcaagccaagtctgggtg

SEQ ID NO: 125 - DNA, 22 bp, Artificial Sequence
  Description of Artificial Sequence: Synthetic oligonucleotide
atagtttcccaaagcctttgct

SEQ ID NO: 126 - DNA, 22 bp, Artificial Sequence
  Description of Artificial Sequence: Synthetic oligonucleotide
tatgcatgtgttattaatagca

SEQ ID NO: 127 - DNA, 22 bp, Artificial Sequence
  Description of Artificial Sequence: Synthetic oligonucleotide
gaagagtaggatattcacatgt

SEQ ID NO: 128 - DNA, 22 bp, Artificial Sequence
  Description of Artificial Sequence: Synthetic oligonucleotide
tttccagtccactttcagaggc

SEQ ID NO: 129 - DNA, 22 bp, Artificial Sequence
  Description of Artificial Sequence: Synthetic oligonucleotide
ctgttgcatgagagcctgggcg

SEQ ID NO: 130 - DNA, 22 bp, Artificial Sequence
  Description of Artificial Sequence: Synthetic oligonucleotide
tatagaaatctcagcagcgcca

SEQ ID NO: 131 - DNA, 22 bp, Artificial Sequence
  Description of Artificial Sequence: Synthetic oligonucleotide
taatgacagagaaagcacacca

SEQ ID NO: 132 - DNA, 22 bp, Artificial Sequence
  Description of Artificial Sequence: Synthetic oligonucleotide
taattgaggtccatatcccggc

SEQ ID NO: 133 - DNA, 22 bp, Artificial Sequence
  Description of Artificial Sequence: Synthetic oligonucleotide
ttattgcagggacatctgagcc

SEQ ID NO: 134 - DNA, 22 bp, Artificial Sequence
  Description of Artificial Sequence: Synthetic oligonucleotide
ttcctctaccatttaaggtcca

SEQ ID NO: 135 - DNA, 22 bp, Artificial Sequence
  Description of Artificial Sequence: Synthetic oligonucleotide
attgggtgcacttatagagcag

SEQ ID NO: 136 - DNA, 22 bp, Artificial Sequence
  Description of Artificial Sequence: Synthetic oligonucleotide
attactagattatttggccgct

SEQ ID NO: 137 - DNA, 22 bp, Artificial Sequence
  Description of Artificial Sequence: Synthetic oligonucleotide
ttaatcacaaatagcttatcct

SEQ ID NO: 138 - DNA, 22 bp, Artificial Sequence
  Description of Artificial Sequence: Synthetic oligonucleotide
tttgtaaatccgtttctttctt

SEQ ID NO: 139 - DNA, 22 bp, Artificial Sequence
  Description of Artificial Sequence: Synthetic oligonucleotide
ttgaacaaggaatttagcagat

SEQ ID NO: 140 - DNA, 22 bp, Artificial Sequence
  Description of Artificial Sequence: Synthetic oligonucleotide
tttaccaaagttcaagataggc

SEQ ID NO: 141 - DNA, 22 bp, Artificial Sequence
  Description of Artificial Sequence: Synthetic oligonucleotide
ttaacacttcactgtaactcct

SEQ ID NO: 142 - DNA, 22 bp, Artificial Sequence
  Description of Artificial Sequence: Synthetic oligonucleotide
aatatgcatcccaaacgtcggg

SEQ ID NO: 143 - DNA, 22 bp, Artificial Sequence
  Description of Artificial Sequence: Synthetic oligonucleotide
atcaagaacatcttactgtcca

SEQ ID NO: 144 - DNA, 22 bp, Artificial Sequence
  Description of Artificial Sequence: Synthetic oligonucleotide
ataatgatacatgctctgccct

SEQ ID NO: 145 - DNA, 22 bp, Artificial Sequence
  Description of Artificial Sequence: Synthetic oligonucleotide
aatagtttcagttgctcagccc

SEQ ID NO: 146 - DNA, 22 bp, Artificial Sequence
  Description of Artificial Sequence: Synthetic oligonucleotide
ttgacaaaccaagggctcaggg

SEQ ID NO: 147 - DNA, 22 bp, Artificial Sequence
  Description of Artificial Sequence: Synthetic oligonucleotide
ttgttgttaggagacctcaggc

SEQ ID NO: 148 - DNA, 22 bp, Artificial Sequence
  Description of Artificial Sequence: Synthetic oligonucleotide
ttatactcttattaacattgcg

SEQ ID NO: 149 - DNA, 22 bp, Artificial Sequence
  Description of Artificial Sequence: Synthetic oligonucleotide
attagcatggatcgtctgttct

SEQ ID NO: 150 - DNA, 22 bp, Artificial Sequence
  Description of Artificial Sequence: Synthetic oligonucleotide
aataattcagacatatcctcct

SEQ ID NO: 151 - DNA, 22 bp, Artificial Sequence
  Description of Artificial Sequence: Synthetic oligonucleotide
tatgcttaacacaatgcctgac

SEQ ID NO: 152 - DNA, 22 bp, Artificial Sequence
  Description of Artificial Sequence: Synthetic oligonucleotide
ttatttccttgattcggttcct

SEQ ID NO: 153 - DNA, 22 bp, Artificial Sequence
  Description of Artificial Sequence: Synthetic oligonucleotide
attcccaacagttctgggtcgc

SEQ ID NO: 154 - DNA, 22 bp, Artificial Sequence
  Description of Artificial Sequence: Synthetic oligonucleotide
ataatcaaatacaatacagggc

SEQ ID NO: 155 - DNA, 22 bp, Artificial Sequence
  Description of Artificial Sequence: Synthetic oligonucleotide
ttaaataagggctttgtgtgct

SEQ ID NO: 156 - DNA, 22 bp, Artificial Sequence
  Description of Artificial Sequence: Synthetic oligonucleotide
ataaagaagattggaggccgca

SEQ ID NO: 157 - DNA, 22 bp, Artificial Sequence
  Description of Artificial Sequence: Synthetic oligonucleotide
ttcatggatgggattatcagaa

SEQ ID NO: 158 - DNA, 22 bp, Artificial Sequence
  Description of Artificial Sequence: Synthetic oligonucleotide
atggagaaagtctggatgtcct

SEQ ID NO: 159 - DNA, 22 bp, Artificial Sequence
  Description of Artificial Sequence: Synthetic oligonucleotide
ttggtgtacttgtaaagtcggc

SEQ ID NO: 160 - DNA, 22 bp, Artificial Sequence
  Description of Artificial Sequence: Synthetic oligonucleotide
atcagaggacatattaataggg

SEQ ID NO: 161 - DNA, 22 bp, Artificial Sequence
  Description of Artificial Sequence: Synthetic oligonucleotide
taaaggtcaaatgagttgtggg

SEQ ID NO: 162 - DNA, 22 bp, Artificial Sequence
  Description of Artificial Sequence: Synthetic oligonucleotide
aattactaccactcagggtgca

SEQ ID NO: 163 - DNA, 22 bp, Artificial Sequence
  Description of Artificial Sequence: Synthetic oligonucleotide
ttataagacaatttatcaggca

SEQ ID NO: 164 - DNA, 22 bp, Artificial Sequence
  Description of Artificial Sequence: Synthetic oligonucleotide
ttaaatactcagaacgactctc

SEQ ID NO: 165 - DNA, 22 bp, Artificial Sequence
  Description of Artificial Sequence: Synthetic oligonucleotide
tttattgtgggaggtgtctgga

SEQ ID NO: 166 - DNA, 22 bp, Artificial Sequence
  Description of Artificial Sequence: Synthetic oligonucleotide
ttcagtgatggtgctccatgct

SEQ ID NO: 167 - DNA, 22 bp, Artificial Sequence
  Description of Artificial Sequence: Synthetic oligonucleotide
tttcatcttcaggtaccaccgg

SEQ ID NO: 168 - DNA, 22 bp, Artificial Sequence
  Description of Artificial Sequence: Synthetic oligonucleotide
ttgctctgatactcaatgagct

SEQ ID NO: 169 - DNA, 22 bp, Artificial Sequence
  Description of Artificial Sequence: Synthetic oligonucleotide
taatcccaggaatggttctcag

SEQ ID NO: 170 - DNA, 22 bp, Artificial Sequence
  Description of Artificial Sequence: Synthetic oligonucleotide
attgtaatccacagttggaggg

SEQ ID NO: 171 - DNA, 22 bp, Artificial Sequence
  Description of Artificial Sequence: Synthetic oligonucleotide
ttgctgagagattgggcccggg

SEQ ID NO: 172 - DNA, 22 bp, Artificial Sequence
  Description of Artificial Sequence: Synthetic oligonucleotide
ataatctcaagtatcccatccg

SEQ ID NO: 173 - DNA, 22 bp, Artificial Sequence
  Description of Artificial Sequence: Synthetic oligonucleotide
atctaactcctgaggaggtggc

SEQ ID NO: 174 - DNA, 22 bp, Artificial Sequence
  Description of Artificial Sequence: Synthetic oligonucleotide
tttaccagtgacatcttgaccc

SEQ ID NO: 175 - DNA, 22 bp, Artificial Sequence
  Description of Artificial Sequence: Synthetic oligonucleotide
ttagttactctctttccctcca

SEQ ID NO: 176 - DNA, 22 bp, Artificial Sequence
  Description of Artificial Sequence: Synthetic oligonucleotide
tgtagatttcatccagtctctc

SEQ ID NO: 177 - DNA, 22 bp, Artificial Sequence
  Description of Artificial Sequence: Synthetic oligonucleotide
attgcatttgggtgcggatggc

SEQ ID NO: 178 - DNA, 22 bp, Artificial Sequence
  Description of Artificial Sequence: Synthetic oligonucleotide
atttctcgatctacacgatcca

SEQ ID NO: 179 - DNA, 22 bp, Artificial Sequence
  Description of Artificial Sequence: Synthetic oligonucleotide
aatccattccgatttctgagga

SEQ ID NO: 180 - DNA, 22 bp, Artificial Sequence
  Description of Artificial Sequence: Synthetic oligonucleotide
ttcaaagaagaggcgcttggct

SEQ ID NO: 181 - DNA, 22 bp, Artificial Sequence
  Description of Artificial Sequence: Synthetic oligonucleotide
ttcagaggaaatatggttgccg

SEQ ID NO: 182 - DNA, 22 bp, Artificial Sequence
  Description of Artificial Sequence: Synthetic oligonucleotide
taatcacagcacaatcattgca

SEQ ID NO: 183 - DNA, 22 bp, Artificial Sequence
  Description of Artificial Sequence: Synthetic oligonucleotide
ttatccacgacattgcttaggt

SEQ ID NO: 184 - DNA, 22 bp, Artificial Sequence
  Description of Artificial Sequence: Synthetic oligonucleotide
atgaaagaccagctaatctgga

SEQ ID NO: 185 - DNA, 22 bp, Artificial Sequence
  Description of Artificial Sequence: Synthetic oligonucleotide
ttgtaatcaagattcttgggcg

SEQ ID NO: 186 - DNA, 22 bp, Artificial Sequence
  Description of Artificial Sequence: Synthetic oligonucleotide
atttgtaatgctttcaagacat

SEQ ID NO: 187 - DNA, 22 bp, Artificial Sequence
  Description of Artificial Sequence: Synthetic oligonucleotide
taagggatggagagacacagcc

SEQ ID NO: 188 - DNA, 22 bp, Artificial Sequence
  Description of Artificial Sequence: Synthetic oligonucleotide
tttctctgagacggactgcgcc

SEQ ID NO: 189 - DNA, 22 bp, Artificial Sequence
  Description of Artificial Sequence: Synthetic oligonucleotide
ctgaataaggtcaagatctgct

SEQ ID NO: 190 - DNA, 22 bp, Artificial Sequence
  Description of Artificial Sequence: Synthetic oligonucleotide
gatgtagtacaccttggcggca

SEQ ID NO: 191 - DNA, 22 bp, Artificial Sequence
  Description of Artificial Sequence: Synthetic oligonucleotide
tatgtaaatcattcagcctggt

SEQ ID NO: 192 - DNA, 22 bp, Artificial Sequence
  Description of Artificial Sequence: Synthetic oligonucleotide
tagcaccataccacgtgggcca

SEQ ID NO: 193 - DNA, 22 bp, Artificial Sequence
  Description of Artificial Sequence: Synthetic oligonucleotide
attgtgtgacatatcatctgca

SEQ ID NO: 194 - DNA, 22 bp, Artificial Sequence
  Description of Artificial Sequence: Synthetic oligonucleotide
ttagggatttattacagttggg

SEQ ID NO: 195 - DNA, 22 bp, Artificial Sequence
  Description of Artificial Sequence: Synthetic oligonucleotide
attattcctagcaaacacacgg

SEQ ID NO: 196 - DNA, 22 bp, Artificial Sequence
  Description of Artificial Sequence: Synthetic oligonucleotide
ttgggcctgtacataatatggt

SEQ ID NO: 197 - DNA, 22 bp, Artificial Sequence
  Description of Artificial Sequence: Synthetic oligonucleotide
tttgtgagaggcttgaatggct

SEQ ID NO: 198 - DNA, 22 bp, Artificial Sequence
  Description of Artificial Sequence: Synthetic oligonucleotide
taatatgacaggttggtgacgt

SEQ ID NO: 199 - DNA, 22 bp, Artificial Sequence
  Description of Artificial Sequence: Synthetic oligonucleotide
ttccaatttgtcatgattccca

SEQ ID NO: 200 - DNA, 22 bp, Artificial Sequence
  Description of Artificial Sequence: Synthetic oligonucleotide
ttgtaagttcttaggatatgcc

SEQ ID NO: 201 - DNA, 22 bp, Artificial Sequence
  Description of Artificial Sequence: Synthetic oligonucleotide
attaaatcttcatctgatgcct

SEQ ID NO: 202 - DNA, 22 bp, Artificial Sequence
  Description of Artificial Sequence: Synthetic oligonucleotide
tttgcttctctcatcttgagca

SEQ ID NO: 203 - DNA, 22 bp, Artificial Sequence
  Description of Artificial Sequence: Synthetic oligonucleotide
attgagactgagatattcaccg

SEQ ID NO: 204 - DNA, 22 bp, Artificial Sequence
  Description of Artificial Sequence: Synthetic oligonucleotide
tttgctttgtcaatcaccagga

SEQ ID NO: 205 - DNA, 22 bp, Artificial Sequence
  Description of Artificial Sequence: Synthetic oligonucleotide
ttaacatcttggttggagcggc

SEQ ID NO: 206 - DNA, 22 bp, Artificial Sequence
  Description of Artificial Sequence: Synthetic oligonucleotide
taaataaccttcataatcccgt

SEQ ID NO: 207 - DNA, 22 bp, Artificial Sequence
  Description of Artificial Sequence: Synthetic oligonucleotide
tacacgtaggagacgatctggt

SEQ ID NO: 208 - DNA, 22 bp, Artificial Sequence
  Description of Artificial Sequence: Synthetic oligonucleotide
tttggagacaagtctggtggcg

SEQ ID NO: 209 - DNA, 22 bp, Artificial Sequence
  Description of Artificial Sequence: Synthetic oligonucleotide
tattgcattgggacgatgaggg

SEQ ID NO: 210 - DNA, 22 bp, Artificial Sequence
  Description of Artificial Sequence: Synthetic oligonucleotide
tttagcaatgcagaacttggca

SEQ ID NO: 211 - DNA, 22 bp, Artificial Sequence
  Description of Artificial Sequence: Synthetic oligonucleotide
atgtagttcaaagtacgttcct

SEQ ID NO: 212 - DNA, 22 bp, Artificial Sequence
  Description of Artificial Sequence: Synthetic oligonucleotide
ttccaatttcagtgagtgtccg

SEQ ID NO: 213 - DNA, 22 bp, Artificial Sequence
  Description of Artificial Sequence: Synthetic oligonucleotide
tttccagattaatcacaaggct

SEQ ID NO: 214 - DNA, 22 bp, Artificial Sequence
  Description of Artificial Sequence: Synthetic oligonucleotide
tttgctcttattcccgtgggct

SEQ ID NO: 215 - DNA, 22 bp, Artificial Sequence
  Description of Artificial Sequence: Synthetic oligonucleotide
tttctctctacaacttgatcct

SEQ ID NO: 216 - DNA, 22 bp, Artificial Sequence
  Description of Artificial Sequence: Synthetic oligonucleotide
atacccttcaacatatccaggt

SEQ ID NO: 217 - DNA, 22 bp, Artificial Sequence
  Description of Artificial Sequence: Synthetic oligonucleotide
tttagaaatgggaggaccagcc

SEQ ID NO: 218 - DNA, 22 bp, Artificial Sequence
  Description of Artificial Sequence: Synthetic oligonucleotide
ataacctttcagagagggtccc

SEQ ID NO: 219 - DNA, 22 bp, Artificial Sequence
  Description of Artificial Sequence: Synthetic oligonucleotide
ttagcacagtaaatactgtgct

SEQ ID NO: 220 - DNA, 22 bp, Artificial Sequence
  Description of Artificial Sequence: Synthetic oligonucleotide
ttgaaataagggagtctgtggg

SEQ ID NO: 221 - DNA, 22 bp, Artificial Sequence
  Description of Artificial Sequence: Synthetic oligonucleotide
ttcctcttggacttgtagacgc

SEQ ID NO: 222 - DNA, 22 bp, Artificial Sequence
  Description of Artificial Sequence: Synthetic oligonucleotide
ttgtcttgccactgtgtttgcc

SEQ ID NO: 223 - DNA, 22 bp, Artificial Sequence
  Description of Artificial Sequence: Synthetic oligonucleotide
ttgtattctgagtctccgtgca

SEQ ID NO: 224 - DNA, 22 bp, Artificial Sequence
  Description of Artificial Sequence: Synthetic oligonucleotide
tttattgatgaggtctttggct

SEQ ID NO: 225 - DNA, 22 bp, Artificial Sequence
  Description of Artificial Sequence: Synthetic oligonucleotide
tacatgatgactccaatggccc

SEQ ID NO: 226 - DNA, 22 bp, Artificial Sequence
  Description of Artificial Sequence: Synthetic oligonucleotide
caaacttatgagttggacagcc

SEQ ID NO: 227 - DNA, 22 bp, Artificial Sequence
  Description of Artificial Sequence: Synthetic oligonucleotide
ttctttgatccatctccagcct

SEQ ID NO: 228 - DNA, 22 bp, Artificial Sequence
  Description of Artificial Sequence: Synthetic oligonucleotide
ctcctcaagcacaggacaaggg

SEQ ID NO: 229 - DNA, 22 bp, Artificial Sequence
  Description of Artificial Sequence: Synthetic oligonucleotide
atttgaatgggatttctatcct

SEQ ID NO: 230 - DNA, 22 bp, Artificial Sequence
  Description of Artificial Sequence: Synthetic oligonucleotide
atagacaaaggatttgacaggc

SEQ ID NO: 231 - DNA, 22 bp, Artificial Sequence
  Description of Artificial Sequence: Synthetic oligonucleotide
atacaggattagagagagtggg

SEQ ID NO: 232 - DNA, 22 bp, Artificial Sequence
  Description of Artificial Sequence: Synthetic oligonucleotide
atagtgggataaattctcaccg

SEQ ID NO: 233 - DNA, 22 bp, Artificial Sequence
  Description of Artificial Sequence: Synthetic oligonucleotide
ttattgtgagggattgtctgga

SEQ ID NO: 234 - DNA, 22 bp, Artificial Sequence
  Description of Artificial Sequence: Synthetic oligonucleotide
ataactcaggagtgggtcatcc

SEQ ID NO: 235 - DNA, 22 bp, Artificial Sequence
  Description of Artificial Sequence: Synthetic oligonucleotide
ttcattatcggcagtaactcgt

SEQ ID NO: 236 - DNA, 22 bp, Artificial Sequence
  Description of Artificial Sequence: Synthetic oligonucleotide
tttgcctttaatccactctgcg

SEQ ID NO: 237 - DNA, 22 bp, Artificial Sequence
  Description of Artificial Sequence: Synthetic oligonucleotide
ttagctcttcatatatcaacct

SEQ ID NO: 238 - DNA, 22 bp, Artificial Sequence
  Description of Artificial Sequence: Synthetic oligonucleotide
atagtccaagaggaagtctcca

SEQ ID NO: 239 - DNA, 22 bp, Artificial Sequence
  Description of Artificial Sequence: Synthetic oligonucleotide
tttcctatttctttactggcca

SEQ ID NO: 240 - DNA, 22 bp, Artificial Sequence
  Description of Artificial Sequence: Synthetic oligonucleotide
tttggtaaggttattcccaggc

SEQ ID NO: 241 - DNA, 22 bp, Artificial Sequence
  Description of Artificial Sequence: Synthetic oligonucleotide
aatgtcacacaggtgaccaggg

SEQ ID NO: 242 - DNA, 22 bp, Artificial Sequence
  Description of Artificial Sequence: Synthetic oligonucleotide
ttagaatcacagtccaacagtc

SEQ ID NO: 243 - DNA, 22 bp, Artificial Sequence
  Description of Artificial Sequence: Synthetic oligonucleotide
tttctggttgtgtcagtggccg

SEQ ID NO: 244 - DNA, 22 bp, Artificial Sequence
  Description of Artificial Sequence: Synthetic oligonucleotide
tttatggactccctggtgggca

SEQ ID NO: 245 - DNA, 22 bp, Artificial Sequence
  Description of Artificial Sequence: Synthetic oligonucleotide
taatgcatttacttattctccc

SEQ ID NO: 246 - DNA, 22 bp, Artificial Sequence
  Description of Artificial Sequence: Synthetic oligonucleotide
tttgctttccaaggaggaacgg

SEQ ID NO: 247 - DNA, 22 bp, Artificial Sequence
  Description of Artificial Sequence: Synthetic oligonucleotide
atttgttcccatattgcaggca

SEQ ID NO: 248 - DNA, 22 bp, Artificial Sequence
  Description of Artificial Sequence: Synthetic oligonucleotide
attgtgaggaatacagggagga

SEQ ID NO: 249 - DNA, 22 bp, Artificial Sequence
  Description of Artificial Sequence: Synthetic oligonucleotide
tattccatgcttaagaatacgt

SEQ ID NO: 250 - DNA, 22 bp, Artificial Sequence
  Description of Artificial Sequence: Synthetic oligonucleotide
attggttaccataagagaggca

SEQ ID NO: 251 - DNA, 22 bp, Artificial Sequence
  Description of Artificial Sequence: Synthetic oligonucleotide
catcggaagcaaactaaatgga

SEQ ID NO: 252 - DNA, 22 bp, Artificial Sequence
  Description of Artificial Sequence: Synthetic oligonucleotide
atatacaagtcctgcatgtccc

SEQ ID NO: 253 - DNA, 22 bp, Artificial Sequence
  Description of Artificial Sequence: Synthetic oligonucleotide
atttcataaccttctatgacct

SEQ ID NO: 254 - DNA, 22 bp, Artificial Sequence
  Description of Artificial Sequence: Synthetic oligonucleotide
attctgtcttggatcttaggca

SEQ ID NO: 255 - DNA, 22 bp, Artificial Sequence
  Description of Artificial Sequence: Synthetic oligonucleotide
ataataactaggtgcctgaccc

SEQ ID NO: 256 - DNA, 22 bp, Artificial Sequence
  Description of Artificial Sequence: Synthetic oligonucleotide
gtagaggtcaaagtcaatgcgt

SEQ ID NO: 257 - DNA, 22 bp, Artificial Sequence
  Description of Artificial Sequence: Synthetic oligonucleotide
aatagggaagatacagcaggca

SEQ ID NO: 258 - DNA, 22 bp, Artificial Sequence
  Description of Artificial Sequence: Synthetic oligonucleotide
tagatttacccaggaaacagct

SEQ ID NO: 259 - DNA, 22 bp, Artificial Sequence
  Description of Artificial Sequence: Synthetic oligonucleotide
aacaagacacaaggactatccc

SEQ ID NO: 260 - DNA, 22 bp, Artificial Sequence
  Description of Artificial Sequence: Synthetic oligonucleotide
atttggtgactttgatacaggc

SEQ ID NO: 261 - DNA, 22 bp, Artificial Sequence
  Description of Artificial Sequence: Synthetic oligonucleotide
tttgcctatcactctatctgtc

SEQ ID NO: 262 - DNA, 22 bp, Artificial Sequence
  Description of Artificial Sequence: Synthetic oligonucleotide
tattctaatccaatatacagca

SEQ ID NO: 263 - DNA, 22 bp, Artificial Sequence
  Description of Artificial Sequence: Synthetic oligonucleotide
taactaactcaacagactgggc

SEQ ID NO: 264 - DNA, 22 bp, Artificial Sequence
  Description of Artificial Sequence: Synthetic oligonucleotide
ataatgattcaaagggagacca

SEQ ID NO: 265 - DNA, 22 bp, Artificial Sequence
  Description of Artificial Sequence: Synthetic oligonucleotide
tttggtttcaccatagcgaggc

SEQ ID NO: 266 - DNA, 22 bp, Artificial Sequence
  Description of Artificial Sequence: Synthetic oligonucleotide
atagttgtgcatctttgctggc

SEQ ID NO: 267 - DNA, 22 bp, Artificial Sequence
  Description of Artificial Sequence: Synthetic oligonucleotide
atttccaatgaaactacgtcgt

SEQ ID NO: 268 - DNA, 22 bp, Artificial Sequence
  Description of Artificial Sequence: Synthetic oligonucleotide
aataaactgcattacaacagct

SEQ ID NO: 269 - DNA, 22 bp, Artificial Sequence
  Description of Artificial Sequence: Synthetic oligonucleotide
ttaatgagtaatttgatctggg

SEQ ID NO: 270 - DNA, 22 bp, Artificial Sequence
  Description of Artificial Sequence: Synthetic oligonucleotide
ttcagctcaattactgagaggt

SEQ ID NO: 271 - DNA, 22 bp, Artificial Sequence
  Description of Artificial Sequence: Synthetic oligonucleotide
tttagacactctagcctccggg

SEQ ID NO: 272 - DNA, 22 bp, Artificial Sequence
  Description of Artificial Sequence: Synthetic oligonucleotide
ataattcagaatctcaagtgcg

SEQ ID NO: 273 - DNA, 22 bp, Artificial Sequence
  Description of Artificial Sequence: Synthetic oligonucleotide
tttccattacagactagaaggc

SEQ ID NO: 274 - DNA, 22 bp, Artificial Sequence
  Description of Artificial Sequence: Synthetic oligonucleotide
ttaagtaatgctaatttaacca

SEQ ID NO: 275 - DNA, 22 bp, Artificial Sequence
  Description of Artificial Sequence: Synthetic oligonucleotide
tagtaccttgctgctgtttggt

SEQ ID NO: 276 - DNA, 22 bp, Artificial Sequence
  Description of Artificial Sequence: Synthetic oligonucleotide
aatttccactaactagggaggt

SEQ ID NO: 277 - DNA, 22 bp, Artificial Sequence
  Description of Artificial Sequence: Synthetic oligonucleotide
ataacaaataccacagagagcc

SEQ ID NO: 278 - DNA, 22 bp, Artificial Sequence
  Description of Artificial Sequence: Synthetic oligonucleotide
tttgtgactcggaagaactggc

SEQ ID NO: 279 - DNA, 22 bp, Artificial Sequence
  Description of Artificial Sequence: Synthetic oligonucleotide
ttctaacggaccaaactgtgcc

SEQ ID NO: 280 - DNA, 22 bp, Artificial Sequence
  Description of Artificial Sequence: Synthetic oligonucleotide
attcaaacaccaggtgaagcct

SEQ ID NO: 281 - DNA, 22 bp, Artificial Sequence
  Description of Artificial Sequence: Synthetic oligonucleotide
atgatcatacagcccaaagccc

SEQ ID NO: 282 - DNA, 22 bp, Artificial Sequence
  Description of Artificial Sequence: Synthetic oligonucleotide
atttgaactgagatttgcagcc

SEQ ID NO: 283 - DNA, 22 bp, Artificial Sequence
  Description of Artificial Sequence: Synthetic oligonucleotide
tttcttcatcatcagactccgg

SEQ ID NO: 284 - DNA, 22 bp, Artificial Sequence
  Description of Artificial Sequence: Synthetic oligonucleotide
aacttctgagctacttcctggt

SEQ ID NO: 285 - DNA, 22 bp, Artificial Sequence
  Description of Artificial Sequence: Synthetic oligonucleotide
tatcactgaggtatcttgggcc

SEQ ID NO: 286 - DNA, 22 bp, Artificial Sequence
  Description of Artificial Sequence: Synthetic oligonucleotide
ttggcaatacatgctttcacgc

SEQ ID NO: 287 - DNA, 22 bp, Artificial Sequence
  Description of Artificial Sequence: Synthetic oligonucleotide
ataggttgcatcatagagggca

SEQ ID NO: 288 - DNA, 22 bp, Artificial Sequence
  Description of Artificial Sequence: Synthetic oligonucleotide
ttaaagggcagattcatatgcg

SEQ ID NO: 289 - DNA, 22 bp, Artificial Sequence
  Description of Artificial Sequence: Synthetic oligonucleotide
tttgaggtagagcttgttgcct

SEQ ID NO: 290 - DNA, 22 bp, Artificial Sequence
  Description of Artificial Sequence: Synthetic oligonucleotide
ttgattcacaatatcctggctt

SEQ ID NO: 291 - DNA, 22 bp, Artificial Sequence
  Description of Artificial Sequence: Synthetic oligonucleotide
ttagatgtgccatgaggtaccg

SEQ ID NO: 292 - DNA, 22 bp, Artificial Sequence
  Description of Artificial Sequence: Synthetic oligonucleotide
tatttacttaggcctcatcggc

SEQ ID NO: 293 - DNA, 22 bp, Artificial Sequence
  Description of Artificial Sequence: Synthetic oligonucleotide
gtagtagaagtcgtaggtgcgc

SEQ ID NO: 294 - DNA, 22 bp, Artificial Sequence
  Description of Artificial Sequence: Synthetic oligonucleotide
aatacaggtgatgccatatcca

SEQ ID NO: 295 - DNA, 22 bp, Artificial Sequence
  Description of Artificial Sequence: Synthetic oligonucleotide
tttgatattggatttggaggca

SEQ ID NO: 296 - DNA, 22 bp, Artificial Sequence
  Description of Artificial Sequence: Synthetic oligonucleotide
atcatactccataatctcgcca

SEQ ID NO: 297 - DNA, 22 bp, Artificial Sequence
  Description of Artificial Sequence: Synthetic oligonucleotide
aagtgcaaagagatgactgcag

SEQ ID NO: 298 - DNA, 22 bp, Artificial Sequence
  Description of Artificial Sequence: Synthetic oligonucleotide
atttgctgcaagtttattggct

SEQ ID NO: 299 - DNA, 22 bp, Artificial Sequence
  Description of Artificial Sequence: Synthetic oligonucleotide
ttagtaaactaaagctgcaggg

SEQ ID NO: 300 - DNA, 22 bp, Artificial Sequence
  Description of Artificial Sequence: Synthetic oligonucleotide
attagaaatatcaaagacaccg

SEQ ID NO: 301 - DNA, 22 bp, Artificial Sequence
  Description of Artificial Sequence: Synthetic oligonucleotide
ttgtgatggccataaatctgtg

SEQ ID NO: 302 - DNA, 22 bp, Artificial Sequence
  Description of Artificial Sequence: Synthetic oligonucleotide
taattcgaagcaaatcacagct

SEQ ID NO: 303 - DNA, 22 bp, Artificial Sequence
  Description of Artificial Sequence: Synthetic oligonucleotide
taacatgtctatttaacctgga

SEQ ID NO: 304 - DNA, 22 bp, Artificial Sequence
  Description of Artificial Sequence: Synthetic oligonucleotide
atcttgttggtgtctgtgtgca

SEQ ID NO: 305 - DNA, 22 bp, Artificial Sequence
  Description of Artificial Sequence: Synthetic oligonucleotide
attcgttagtacatatccagga

SEQ ID NO: 306 - DNA, 22 bp, Artificial Sequence
  Description of Artificial Sequence: Synthetic oligonucleotide
tatactccacacatcacaaggc

SEQ ID NO: 307 - DNA, 22 bp, Artificial Sequence
  Description of Artificial Sequence: Synthetic oligonucleotide
ttaacagtgtaggtacgctccc

SEQ ID NO: 308 - DNA, 22 bp, Artificial Sequence
  Description of Artificial Sequence: Synthetic oligonucleotide
attagggacttcaaacattggt

SEQ ID NO: 309 - DNA, 22 bp, Artificial Sequence
  Description of Artificial Sequence: Synthetic oligonucleotide
tttctgtgggagctggctaggc

SEQ ID NO: 310 - DNA, 22 bp, Artificial Sequence
  Description of Artificial Sequence: Synthetic oligonucleotide
ttattgacgtacttacttccct

SEQ ID NO: 311 - DNA, 22 bp, Artificial Sequence
  Description of Artificial Sequence: Synthetic oligonucleotide
ttcttcttggtgcctttgtcct

SEQ ID NO: 312 - DNA, 22 bp, Artificial Sequence
  Description of Artificial Sequence: Synthetic oligonucleotide
taaatcaatcagtagctgtgca

SEQ ID NO: 313 - DNA, 22 bp, Artificial Sequence
  Description of Artificial Sequence: Synthetic oligonucleotide
tatcaatggcataggacagcgt

SEQ ID NO: 314 - DNA, 22 bp, Artificial Sequence
  Description of Artificial Sequence: Synthetic oligonucleotide
atgtctcaaaggtctctgacat

SEQ ID NO: 315 - DNA, 22 bp, Artificial Sequence
  Description of Artificial Sequence: Synthetic oligonucleotide
tttcaatgacagatgtgctgct

SEQ ID NO: 316 - DNA, 22 bp, Artificial Sequence
  Description of Artificial Sequence: Synthetic oligonucleotide
ttaaaggagccctgtgtggcca

SEQ ID NO: 317 - DNA, 22 bp, Artificial Sequence
  Description of Artificial Sequence: Synthetic oligonucleotide
atattgtatttgatggaatggt

SEQ ID NO: 318 - DNA, 22 bp, Artificial Sequence
  Description of Artificial Sequence: Synthetic oligonucleotide
ttattgtcataggacatctcct

SEQ ID NO: 319 - DNA, 22 bp, Artificial Sequence
  Description of Artificial Sequence: Synthetic oligonucleotide
ttgagcattgcctttgattgct

SEQ ID NO: 320 - DNA, 22 bp, Artificial Sequence
  Description of Artificial Sequence: Synthetic oligonucleotide
aaccaataggcaatcctgggcc

SEQ ID NO: 321 - DNA, 22 bp, Artificial Sequence
  Description of Artificial Sequence: Synthetic oligonucleotide
tttgagatgcaaattatgccct

SEQ ID NO: 322 - DNA, 22 bp, Artificial Sequence
  Description of Artificial Sequence: Synthetic oligonucleotide
tttattcccgatttcataagca

SEQ ID NO: 323 - DNA, 22 bp, Artificial Sequence
  Description of Artificial Sequence: Synthetic oligonucleotide
taaagagatgacaagcattgct

SEQ ID NO: 324 - DNA, 22 bp, Artificial Sequence
  Description of Artificial Sequence: Synthetic oligonucleotide
tatgattccaacatgatatggc

SEQ ID NO: 325 - DNA, 22 bp, Artificial Sequence
  Description of Artificial Sequence: Synthetic oligonucleotide
ttagcttaatacacagagaccc

SEQ ID NO: 326 - DNA, 22 bp, Artificial Sequence
  Description of Artificial Sequence: Synthetic oligonucleotide
atatttaggacacttcagagca

SEQ ID NO: 327 - DNA, 22 bp, Artificial Sequence
  Description of Artificial Sequence: Synthetic oligonucleotide
atataaagctagaagctgacca

SEQ ID NO: 328 - DNA, 22 bp, Artificial Sequence
  Description of Artificial Sequence: Synthetic oligonucleotide
ttccattctccatcttcctggg

SEQ ID NO: 329 - DNA, 22 bp, Artificial Sequence
  Description of Artificial Sequence: Synthetic oligonucleotide
taatccaaataatgtccaccgt

SEQ ID NO: 330 - DNA, 22 bp, Artificial Sequence
  Description of Artificial Sequence: Synthetic oligonucleotide
ttctccttctccttcagggcct

SEQ ID NO: 331 - DNA, 22 bp, Artificial Sequence
  Description of Artificial Sequence: Synthetic oligonucleotide
taaacaattcattattacacca

SEQ ID NO: 332 - DNA, 22 bp, Artificial Sequence
  Description of Artificial Sequence: Synthetic oligonucleotide
gtatgagaccagttgtgtgggc

SEQ ID NO: 333 - DNA, 22 bp, Artificial Sequence
  Description of Artificial Sequence: Synthetic oligonucleotide
atcttgacacggatagttccag

SEQ ID NO: 334 - DNA, 22 bp, Artificial Sequence
  Description of Artificial Sequence: Synthetic oligonucleotide
atagtccacaacttggtttggg

SEQ ID NO: 335 - DNA, 22 bp, Artificial Sequence
  Description of Artificial Sequence: Synthetic oligonucleotide
gtaatccacaatgaacttgcgc

SEQ ID NO: 336 - DNA, 22 bp, Artificial Sequence
  Description of Artificial Sequence: Synthetic oligonucleotide
atacttcttgacatcatgtcct

SEQ ID NO: 337 - DNA, 22 bp, Artificial Sequence
  Description of Artificial Sequence: Synthetic oligonucleotide
ttgatctcagtggtgcgcacgg

SEQ ID NO: 338 - DNA, 22 bp, Artificial Sequence
  Description of Artificial Sequence: Synthetic oligonucleotide
atgggtaataatattagtgtct

SEQ ID NO: 339 - DNA, 22 bp, Artificial Sequence
  Description of Artificial Sequence: Synthetic oligonucleotide
aataatttaaagggtaagtccg

SEQ ID NO: 340 - DNA, 22 bp, Artificial Sequence
  Description of Artificial Sequence: Synthetic oligonucleotide
atacactttccgtgcatgggca

SEQ ID NO: 341 - DNA, 22 bp, Artificial Sequence
  Description of Artificial Sequence: Synthetic oligonucleotide
ttgatgcattagggtagatggg

SEQ ID NO: 342 - DNA, 22 bp, Artificial Sequence
  Description of Artificial Sequence: Synthetic oligonucleotide
ataagttagaggcggttgtcca

SEQ ID NO: 343 - DNA, 22 bp, Artificial Sequence
  Description of Artificial Sequence: Synthetic oligonucleotide
gtcatattcaaaggtcaagcgg

SEQ ID NO: 344 - DNA, 22 bp, Artificial Sequence
  Description of Artificial Sequence: Synthetic oligonucleotide
atagagtttcacctggaagcct

SEQ ID NO: 345 - DNA, 22 bp, Artificial Sequence
  Description of Artificial Sequence: Synthetic oligonucleotide
aacataaatgaggatctcagca

SEQ ID NO: 346 - DNA, 22 bp, Artificial Sequence
  Description of Artificial Sequence: Synthetic oligonucleotide
ttagataaagacttccagccca

SEQ ID NO: 347 - DNA, 22 bp, Artificial Sequence
  Description of Artificial Sequence: Synthetic oligonucleotide
ttaggcttcctcactttctggt

SEQ ID NO: 348 - DNA, 22 bp, Artificial Sequence
  Description of Artificial Sequence: Synthetic oligonucleotide
aatgaatgtgctgtacggagga

SEQ ID NO: 349 - DNA, 22 bp, Artificial Sequence
  Description of Artificial Sequence: Synthetic oligonucleotide
ttaatttcagtccataactcgt

SEQ ID NO: 350 - DNA, 22 bp, Artificial Sequence
  Description of Artificial Sequence: Synthetic oligonucleotide
ttcattctgcgaatttgctcct

SEQ ID NO: 351 - DNA, 22 bp, Artificial Sequence
  Description of Artificial Sequence: Synthetic oligonucleotide
tattggttccagtttgattgct

SEQ ID NO: 352 - DNA, 22 bp, Artificial Sequence
  Description of Artificial Sequence: Synthetic oligonucleotide
attagtcgtagctttctgtgct

SEQ ID NO: 353 - DNA, 22 bp, Artificial Sequence
  Description of Artificial Sequence: Synthetic oligonucleotide
taatcccttgaaccagaagcca

SEQ ID NO: 354 - DNA, 22 bp, Artificial Sequence
  Description of Artificial Sequence: Synthetic oligonucleotide
ttctcgtaggaaataacctgct

SEQ ID NO: 355 - DNA, 22 bp, Artificial Sequence
  Description of Artificial Sequence: Synthetic oligonucleotide
attatttgagatggaacaggcc

SEQ ID NO: 356 - DNA, 22 bp, Artificial Sequence
  Description of Artificial Sequence: Synthetic oligonucleotide
ttatttccagaggttctgtccc

SEQ ID NO: 357 - DNA, 22 bp, Artificial Sequence
  Description of Artificial Sequence: Synthetic oligonucleotide
atctgaaaggagttactatgct

SEQ ID NO: 358 - DNA, 22 bp, Artificial Sequence
  Description of Artificial Sequence: Synthetic oligonucleotide
ttgttgacatagttgaccagct

SEQ ID NO: 359 - DNA, 22 bp, Artificial Sequence
  Description of Artificial Sequence: Synthetic oligonucleotide
ataaagtgacatttccctgggc

SEQ ID NO: 360 - DNA, 22 bp, Artificial Sequence
  Description of Artificial Sequence: Synthetic oligonucleotide
aagtaactcaacatccttacca

SEQ ID NO: 361 - DNA, 22 bp, Artificial Sequence
  Description of Artificial Sequence: Synthetic oligonucleotide
tttattgctgccctgtttaccc

SEQ ID NO: 362 - DNA, 22 bp, Artificial Sequence
  Description of Artificial Sequence: Synthetic oligonucleotide
tttgagctggagttgctgtccg

SEQ ID NO: 363 - DNA, 22 bp, Artificial Sequence
  Description of Artificial Sequence: Synthetic oligonucleotide
gtatagacaccgatggtaagct

SEQ ID NO: 364 - DNA, 22 bp, Artificial Sequence
  Description of Artificial Sequence: Synthetic oligonucleotide
atatggtttcccaatccctgtc

SEQ ID NO: 365 - DNA, 22 bp, Artificial Sequence
  Description of Artificial Sequence: Synthetic oligonucleotide
tttcctggagagttgcttgggc

SEQ ID NO: 366 - DNA, 22 bp, Artificial Sequence
  Description of Artificial Sequence: Synthetic oligonucleotide
atttgcagatctggtgtcccgt

SEQ ID NO: 367 - DNA, 22 bp, Artificial Sequence
  Description of Artificial Sequence: Synthetic oligonucleotide
tagacttgaaggagaacttcca

SEQ ID NO: 368 - DNA, 22 bp, Artificial Sequence
  Description of Artificial Sequence: Synthetic oligonucleotide
tttaataatctcatctttgcca

SEQ ID NO: 369 - DNA, 22 bp, Artificial Sequence
  Description of Artificial Sequence: Synthetic oligonucleotide
ttatagaaaccgtgttgtcccg

SEQ ID NO: 370 - DNA, 22 bp, Artificial Sequence
  Description of Artificial Sequence: Synthetic oligonucleotide
atatactgtcctatacttccct

SEQ ID NO: 371 - DNA, 22 bp, Artificial Sequence
  Description of Artificial Sequence: Synthetic oligonucleotide
tttattctaccctgcaggaccc

SEQ ID NO: 372 - DNA, 22 bp, Artificial Sequence
  Description of Artificial Sequence: Synthetic oligonucleotide
ttctggatcagccttgcgagga

SEQ ID NO: 373 - DNA, 22 bp, Artificial Sequence
  Description of Artificial Sequence: Synthetic oligonucleotide
tatattctacccaaggacagca

SEQ ID NO: 374 - DNA, 22 bp, Artificial Sequence
  Description of Artificial Sequence: Synthetic oligonucleotide
ataagaaaccgtaaaccaggct

SEQ ID NO: 375 - DNA, 22 bp, Artificial Sequence
  Description of Artificial Sequence: Synthetic oligonucleotide
atttcaggtcagactagaggtg

SEQ ID NO: 376 - DNA, 22 bp, Artificial Sequence
  Description of Artificial Sequence: Synthetic oligonucleotide
tttaactttatcactcagcgct

SEQ ID NO: 377 - DNA, 22 bp, Artificial Sequence
  Description of Artificial Sequence: Synthetic oligonucleotide
ttaaggtgggacatagggagga

SEQ ID NO: 378 - DNA, 22 bp, Artificial Sequence
  Description of Artificial Sequence: Synthetic oligonucleotide
tatcccaatgttatgagaagcc

SEQ ID NO: 379 - DNA, 22 bp, Artificial Sequence
  Description of Artificial Sequence: Synthetic oligonucleotide
ataaactgacatccgagcagct

SEQ ID NO: 380 - DNA, 22 bp, Artificial Sequence
  Description of Artificial Sequence: Synthetic oligonucleotide
attcgtaggtagtattcgacca

SEQ ID NO: 381 - DNA, 22 bp, Artificial Sequence
  Description of Artificial Sequence: Synthetic oligonucleotide
tattgggatgtttcactcggcg

SEQ ID NO: 382 - DNA, 22 bp, Artificial Sequence
  Description of Artificial Sequence: Synthetic oligonucleotide
ttccacaaggtccttcttggcc

SEQ ID NO: 383 - DNA, 22 bp, Artificial Sequence
  Description of Artificial Sequence: Synthetic oligonucleotide
tattcttagcattcaagttctc

SEQ ID NO: 384 - DNA, 22 bp, Artificial Sequence
  Description of Artificial Sequence: Synthetic oligonucleotide
attgtcactgaaataagaacac

SEQ ID NO: 385 - DNA, 22 bp, Artificial Sequence
  Description of Artificial Sequence: Synthetic oligonucleotide
taaatacaaagcttcctctgcc

SEQ ID NO: 386 - DNA, 22 bp, Artificial Sequence
  Description of Artificial Sequence: Synthetic oligonucleotide
tttgtaagagtcaggaggacct

SEQ ID NO: 387 - DNA, 22 bp, Artificial Sequence
  Description of Artificial Sequence: Synthetic oligonucleotide
aacacaatggaacttgagtgct

SEQ ID NO: 388 - DNA, 22 bp, Artificial Sequence
  Description of Artificial Sequence: Synthetic oligonucleotide
atctgtcaaaggcctccttggt

SEQ ID NO: 389 - DNA, 22 bp, Artificial Sequence
  Description of Artificial Sequence: Synthetic oligonucleotide
tttctcaatcaaagggatggca

SEQ ID NO: 390 - DNA, 22 bp, Artificial Sequence
  Description of Artificial Sequence: Synthetic oligonucleotide
aattgaaggaatgtccagacca

SEQ ID NO: 391 - DNA, 22 bp, Artificial Sequence
  Description of Artificial Sequence: Synthetic oligonucleotide
ttaaagtctgaaatgaccttgt

SEQ ID NO: 392 - DNA, 22 bp, Artificial Sequence
  Description of Artificial Sequence: Synthetic oligonucleotide
taattggtggtaaatctgccca

SEQ ID NO: 393 - DNA, 22 bp, Artificial Sequence
  Description of Artificial Sequence: Synthetic oligonucleotide
ataagcataacccttgtttcct

SEQ ID NO: 394 - DNA, 22 bp, Artificial Sequence
  Description of Artificial Sequence: Synthetic oligonucleotide
aataacatccacattaatacct

SEQ ID NO: 395 - DNA, 22 bp, Artificial Sequence
  Description of Artificial Sequence: Synthetic oligonucleotide
tttctatctaggaagctcagcg

SEQ ID NO: 396 - DNA, 22 bp, Artificial Sequence
  Description of Artificial Sequence: Synthetic oligonucleotide
ataattcctggtgttgagtcac

SEQ ID NO: 397 - DNA, 22 bp, Artificial Sequence
  Description of Artificial Sequence: Synthetic oligonucleotide
ttccatcatctcctgcttggcc

SEQ ID NO: 398 - DNA, 22 bp, Artificial Sequence
  Description of Artificial Sequence: Synthetic oligonucleotide
ttgtacaagtacagcccttggt

SEQ ID NO: 399 - DNA, 22 bp, Artificial Sequence
  Description of Artificial Sequence: Synthetic oligonucleotide
atttacaatatggttacctcgc

SEQ ID NO: 400 - DNA, 22 bp, Artificial Sequence
  Description of Artificial Sequence: Synthetic oligonucleotide
tttggatgaccgtctggaggcc

SEQ ID NO: 401 - DNA, 22 bp, Artificial Sequence
  Description of Artificial Sequence: Synthetic oligonucleotide
tagcttcataagatcaccagct

SEQ ID NO: 402 - DNA, 22 bp, Artificial Sequence
  Description of Artificial Sequence: Synthetic oligonucleotide
attcactaacacgatttggcct

SEQ ID NO: 403 - DNA, 22 bp, Artificial Sequence
  Description of Artificial Sequence: Synthetic oligonucleotide
taatgtcaccaacttcagggcc

SEQ ID NO: 404 - DNA, 22 bp, Artificial Sequence
  Description of Artificial Sequence: Synthetic oligonucleotide
atactctctggattcagctgcc

SEQ ID NO: 405 - DNA, 22 bp, Artificial Sequence
  Description of Artificial Sequence: Synthetic oligonucleotide
tttatgcaggtgctgctcccgc

SEQ ID NO: 406 - DNA, 22 bp, Artificial Sequence
  Description of Artificial Sequence: Synthetic oligonucleotide
tttggacttgcaaataagacca

SEQ ID NO: 407 - DNA, 22 bp, Artificial Sequence
  Description of Artificial Sequence: Synthetic oligonucleotide
tatttgtaggagggagttggca

SEQ ID NO: 408 - DNA, 22 bp, Artificial Sequence
  Description of Artificial Sequence: Synthetic oligonucleotide
ttgtctctgataatagtgagca

SEQ ID NO: 409 - DNA, 22 bp, Artificial Sequence
  Description of Artificial Sequence: Synthetic oligonucleotide
aatagttaacaaagtctctggc

SEQ ID NO: 410 - DNA, 22 bp, Artificial Sequence
  Description of Artificial Sequence: Synthetic oligonucleotide
tttcaggtcaagtgaggcaggt

SEQ ID NO: 411 - DNA, 22 bp, Artificial Sequence
  Description of Artificial Sequence: Synthetic oligonucleotide
tttaatacctgcctgagcaccg

SEQ ID NO: 412 - DNA, 22 bp, Artificial Sequence
  Description of Artificial Sequence: Synthetic oligonucleotide
tttagcttcctgctgatctgcc

SEQ ID NO: 413 - DNA, 22 bp, Artificial Sequence
  Description of Artificial Sequence: Synthetic oligonucleotide
taacccaagaattatattcgga

SEQ ID NO: 414 - DNA, 22 bp, Artificial Sequence
  Description of Artificial Sequence: Synthetic oligonucleotide
attctcttctggaaacggaggg

SEQ ID NO: 415 - DNA, 22 bp, Artificial Sequence
  Description of Artificial Sequence: Synthetic oligonucleotide
agaagtgatgctttcatgtgct

SEQ ID NO: 416 - DNA, 22 bp, Artificial Sequence
  Description of Artificial Sequence: Synthetic oligonucleotide
tttgttatgaagataacttgca

SEQ ID NO: 417 - DNA, 22 bp, Artificial Sequence
  Description of Artificial Sequence: Synthetic oligonucleotide
ttatattctcccaagagccggt

SEQ ID NO: 418 - DNA, 22 bp, Artificial Sequence
  Description of Artificial Sequence: Synthetic oligonucleotide
tttgataagaaattcttcagcg

SEQ ID NO: 419 - DNA, 22 bp, Artificial Sequence
  Description of Artificial Sequence: Synthetic oligonucleotide
taaagacataggcggcatcctc

SEQ ID NO: 420 - DNA, 22 bp, Artificial Sequence
  Description of Artificial Sequence: Synthetic oligonucleotide
ttcccactgtgctatgtttgca

SEQ ID NO: 421 - DNA, 22 bp, Artificial Sequence
  Description of Artificial Sequence: Synthetic oligonucleotide
ttctcagaacttaacgtgggca

SEQ ID NO: 422 - DNA, 22 bp, Artificial Sequence
  Description of Artificial Sequence: Synthetic oligonucleotide
attggttaggacagtgcttggt

SEQ ID NO: 423 - DNA, 22 bp, Artificial Sequence
  Description of Artificial Sequence: Synthetic oligonucleotide
ttctggtacccattgactgggc

SEQ ID NO: 424 - DNA, 22 bp, Artificial Sequence
  Description of Artificial Sequence: Synthetic oligonucleotide
taaagagacctgtatgcacgca

SEQ ID NO: 425 - DNA, 22 bp, Artificial Sequence
  Description of Artificial Sequence: Synthetic oligonucleotide
ataatctttctagtccctggca

SEQ ID NO: 426 - DNA, 22 bp, Artificial Sequence
  Description of Artificial Sequence: Synthetic oligonucleotide
ttatctcctgggatgtgctggt

SEQ ID NO: 427 - DNA, 22 bp, Artificial Sequence
  Description of Artificial Sequence: Synthetic oligonucleotide
ttctcttctggctttgttcgga

SEQ ID NO: 428 - DNA, 22 bp, Artificial Sequence
  Description of Artificial Sequence: Synthetic oligonucleotide
gtcagacagcacttcatatgcc

SEQ ID NO: 429 - DNA, 22 bp, Artificial Sequence
  Description of Artificial Sequence: Synthetic oligonucleotide
cacagtcaccgacttgagctgc

SEQ ID NO: 430 - DNA, 22 bp, Artificial Sequence
  Description of Artificial Sequence: Synthetic oligonucleotide
taatttcaatctgcggaaagct

SEQ ID NO: 431 - DNA, 22 bp, Artificial Sequence
  Description of Artificial Sequence: Synthetic oligonucleotide
attcccaatgagccatgctggt

SEQ ID NO: 432 - DNA, 22 bp, Artificial Sequence
  Description of Artificial Sequence: Synthetic oligonucleotide
tatagcaatcgaatggctgggc

SEQ ID NO: 433 - DNA, 22 bp, Artificial Sequence
  Description of Artificial Sequence: Synthetic oligonucleotide
tttggagaggaggatggaaggg

SEQ ID NO: 434 - DNA, 22 bp, Artificial Sequence
  Description of Artificial Sequence: Synthetic oligonucleotide
aatgggtatggaggaaatgcct

SEQ ID NO: 435 - DNA, 22 bp, Artificial Sequence
  Description of Artificial Sequence: Synthetic oligonucleotide
atccactaagagattatggctt

SEQ ID NO: 436 - DNA, 22 bp, Artificial Sequence
  Description of Artificial Sequence: Synthetic oligonucleotide
ttctctgtccgtagtgtctcca

SEQ ID NO: 437 - DNA, 22 bp, Artificial Sequence
  Description of Artificial Sequence: Synthetic oligonucleotide
atttcacaacagacatcttgcc

SEQ ID NO: 438 - DNA, 22 bp, Artificial Sequence
  Description of Artificial Sequence: Synthetic oligonucleotide
ttatccttgtagctgggcggca

SEQ ID NO: 439 - DNA, 22 bp, Artificial Sequence
  Description of Artificial Sequence: Synthetic oligonucleotide
ttaagtagcaagttgatgaggg

SEQ ID NO: 440 - DNA, 22 bp, Artificial Sequence
  Description of Artificial Sequence: Synthetic oligonucleotide
ttgctatatgggtcataccggt

SEQ ID NO: 441 - DNA, 22 bp, Artificial Sequence
  Description of Artificial Sequence: Synthetic oligonucleotide
tttatccataagtaactttgct

SEQ ID NO: 442 - DNA, 22 bp, Artificial Sequence
  Description of Artificial Sequence: Synthetic oligonucleotide
aagccttaacatttcaagggct

SEQ ID NO: 443 - DNA, 22 bp, Artificial Sequence
  Description of Artificial Sequence: Synthetic oligonucleotide
gttggaatccaaagtgtagcct

SEQ ID NO: 444 - DNA, 22 bp, Artificial Sequence
  Description of Artificial Sequence: Synthetic oligonucleotide
tttggtagccacggataatccc

SEQ ID NO: 445 - DNA, 22 bp, Artificial Sequence
  Description of Artificial Sequence: Synthetic oligonucleotide
taatagatgagggagatgaggg

SEQ ID NO: 446 - DNA, 22 bp, Artificial Sequence
  Description of Artificial Sequence: Synthetic oligonucleotide
tttggtactgaattaccgtgcg

SEQ ID NO: 447 - DNA, 22 bp, Artificial Sequence
  Description of Artificial Sequence: Synthetic oligonucleotide
ataaccaatcccattctgctgc

SEQ ID NO: 448 - DNA, 22 bp, Artificial Sequence
  Description of Artificial Sequence: Synthetic oligonucleotide
tagggcaagatctccacagggc

SEQ ID NO: 449 - DNA, 22 bp, Artificial Sequence
  Description of Artificial Sequence: Synthetic oligonucleotide
tattcttccttcagccactgcc

SEQ ID NO: 450 - DNA, 22 bp, Artificial Sequence
  Description of Artificial Sequence: Synthetic oligonucleotide
gtgcaattaccaaggacaggcc

SEQ ID NO: 451 - DNA, 22 bp, Artificial Sequence
  Description of Artificial Sequence: Synthetic oligonucleotide
tatgttaacgtgtgggtgtggg

SEQ ID NO: 452 - DNA, 22 bp, Artificial Sequence
  Description of Artificial Sequence: Synthetic oligonucleotide
attggagaggacatcctgatgc

SEQ ID NO: 453 - DNA, 22 bp, Artificial Sequence
  Description of Artificial Sequence: Synthetic oligonucleotide
taaatggaatgaaacttccctt

SEQ ID NO: 454 - DNA, 22 bp, Artificial Sequence
  Description of Artificial Sequence: Synthetic oligonucleotide
attcctgttaacttctctagct

SEQ ID NO: 455 - DNA, 22 bp, Artificial Sequence
  Description of Artificial Sequence: Synthetic oligonucleotide
tttcatctcatctaaatgaccc

SEQ ID NO: 456 - DNA, 22 bp, Artificial Sequence
  Description of Artificial Sequence: Synthetic oligonucleotide
atggcattcctcttgttgggcc

SEQ ID NO: 457 - DNA, 22 bp, Artificial Sequence
  Description of Artificial Sequence: Synthetic oligonucleotide
atgggttattgcagaacagctt

SEQ ID NO: 458 - DNA, 22 bp, Artificial Sequence
  Description of Artificial Sequence: Synthetic oligonucleotide
ttatgatctcaatgtgacaggg

SEQ ID NO: 459 - DNA, 22 bp, Artificial Sequence
  Description of Artificial Sequence: Synthetic oligonucleotide
taggatgttggcggcgtaggcg

SEQ ID NO: 460 - DNA, 22 bp, Artificial Sequence
  Description of Artificial Sequence: Synthetic oligonucleotide
tttgtagacatcctggagaggc

SEQ ID NO: 461 - DNA, 22 bp, Artificial Sequence
  Description of Artificial Sequence: Synthetic oligonucleotide
atagatgacaaaggtgaagcca

SEQ ID NO: 462 - DNA, 22 bp, Artificial Sequence
  Description of Artificial Sequence: Synthetic oligonucleotide
ttacaaagggacttgttgtcga

SEQ ID NO: 463 - DNA, 22 bp, Artificial Sequence
  Description of Artificial Sequence: Synthetic oligonucleotide
attgactagtatgttgggccca

SEQ ID NO: 464 - DNA, 22 bp, Artificial Sequence
  Description of Artificial Sequence: Synthetic oligonucleotide
tatctagatggctctctgacca

SEQ ID NO: 465 - DNA, 22 bp, Artificial Sequence
  Description of Artificial Sequence: Synthetic oligonucleotide
atgttgaacactcgattcagca

SEQ ID NO: 466 - DNA, 22 bp, Artificial Sequence
  Description of Artificial Sequence: Synthetic oligonucleotide
ttagcatttgttcttctgccct

SEQ ID NO: 467 - DNA, 22 bp, Artificial Sequence
  Description of Artificial Sequence: Synthetic oligonucleotide
taaaggaatttcttccaaacgc

SEQ ID NO: 468 - DNA, 22 bp, Artificial Sequence
  Description of Artificial Sequence: Synthetic oligonucleotide
tcttgtactctgtcactgtctt

SEQ ID NO: 469 - DNA, 22 bp, Artificial Sequence
  Description of Artificial Sequence: Synthetic oligonucleotide
atattcatggccaacatctggc

SEQ ID NO: 470 - DNA, 22 bp, Artificial Sequence
  Description of Artificial Sequence: Synthetic oligonucleotide
ttaagaaatcttgaggccagcg

SEQ ID NO: 471 - DNA, 22 bp, Artificial Sequence
  Description of Artificial Sequence: Synthetic oligonucleotide
ttctttacaaagttaatggcca

SEQ ID NO: 472 - DNA, 22 bp, Artificial Sequence
  Description of Artificial Sequence: Synthetic oligonucleotide
attctttacaaagttaatggcc

SEQ ID NO: 473 - DNA, 22 bp, Artificial Sequence
  Description of Artificial Sequence: Synthetic oligonucleotide
tttcaaagtccaggtctttgcc

SEQ ID NO: 474 - DNA, 22 bp, Artificial Sequence
  Description of Artificial Sequence: Synthetic oligonucleotide
aatttgattgatcgtctttggt

SEQ ID NO: 475 - DNA, 22 bp, Artificial Sequence
  Description of Artificial Sequence: Synthetic oligonucleotide
ttggtaattaacataaagcgct

SEQ ID NO: 476 - DNA, 22 bp, Artificial Sequence
  Description of Artificial Sequence: Synthetic oligonucleotide
aatcagctagaactttgtccac

SEQ ID NO: 477 - DNA, 22 bp, Artificial Sequence
  Description of Artificial Sequence: Synthetic oligonucleotide
gtacatgatggcatgaacacca

SEQ ID NO: 478 - DNA, 22 bp, Artificial Sequence
  Description of Artificial Sequence: Synthetic oligonucleotide
attctctgtgccacaatttgcc

SEQ ID NO: 479 - DNA, 22 bp, Artificial Sequence
  Description of Artificial Sequence: Synthetic oligonucleotide
tatagacttgtgcttgtcacag

SEQ ID NO: 480 - DNA, 22 bp, Artificial Sequence
  Description of Artificial Sequence: Synthetic oligonucleotide
tagagcccaatcattgtttcca

SEQ ID NO: 481 - DNA, 22 bp, Artificial Sequence
  Description of Artificial Sequence: Synthetic oligonucleotide
attatcataaccatggtcacct

SEQ ID NO: 482 - DNA, 22 bp, Artificial Sequence
  Description of Artificial Sequence: Synthetic oligonucleotide
ataatgctgccaagagagaccc

SEQ ID NO: 483 - DNA, 22 bp, Artificial Sequence
  Description of Artificial Sequence: Synthetic oligonucleotide
tttacctaatatggtttgtgct

SEQ ID NO: 484 - DNA, 22 bp, Artificial Sequence
  Description of Artificial Sequence: Synthetic oligonucleotide
ttaggatgatattgaggctggt

SEQ ID NO: 485 - DNA, 22 bp, Artificial Sequence
  Description of Artificial Sequence: Synthetic oligonucleotide
aaccattccgagtaagaggccc

SEQ ID NO: 486 - DNA, 22 bp, Artificial Sequence
  Description of Artificial Sequence: Synthetic oligonucleotide
tataaatgtaaccatctcaccc

SEQ ID NO: 487 - DNA, 22 bp, Artificial Sequence
  Description of Artificial Sequence: Synthetic oligonucleotide
taaatcaatcaggctcacagct

SEQ ID NO: 488 - DNA, 22 bp, Artificial Sequence
  Description of Artificial Sequence: Synthetic oligonucleotide
atcactgcgcggactgacgggc

SEQ ID NO: 489 - DNA, 22 bp, Artificial Sequence
  Description of Artificial Sequence: Synthetic oligonucleotide
ttattggaatggagaaacagca

SEQ ID NO: 490 - DNA, 22 bp, Artificial Sequence
  Description of Artificial Sequence: Synthetic oligonucleotide
ttaactaagcagtttagggcct

SEQ ID NO: 491 - DNA, 22 bp, Artificial Sequence
  Description of Artificial Sequence: Synthetic oligonucleotide
atatcccagagactccatggct

SEQ ID NO: 492 - DNA, 22 bp, Artificial Sequence
  Description of Artificial Sequence: Synthetic oligonucleotide
atgtgatagagggactgttggg

SEQ ID NO: 493 - DNA, 22 bp, Artificial Sequence
  Description of Artificial Sequence: Synthetic oligonucleotide
atgtgtaaagaatgcaggtggg

SEQ ID NO: 494 - DNA, 22 bp, Artificial Sequence
  Description of Artificial Sequence: Synthetic oligonucleotide
ttagccaggcgcatggattgct

SEQ ID NO: 495 - DNA, 22 bp, Artificial Sequence
  Description of Artificial Sequence: Synthetic oligonucleotide
ttgtaagctcaggtatgggctg

SEQ ID NO: 496 - DNA, 22 bp, Artificial Sequence
  Description of Artificial Sequence: Synthetic oligonucleotide
ttataaacacacaaacaccggc

SEQ ID NO: 497 - DNA, 22 bp, Artificial Sequence
  Description of Artificial Sequence: Synthetic oligonucleotide
tatactcaggaacagcttaccc

SEQ ID NO: 498 - DNA, 22 bp, Artificial Sequence
  Description of Artificial Sequence: Synthetic oligonucleotide
atttagttcatattgataagga

SEQ ID NO: 499 - DNA, 22 bp, Artificial Sequence
  Description of Artificial Sequence: Synthetic oligonucleotide
tatattgacagttcactagggc

SEQ ID NO: 500 - DNA, 22 bp, Artificial Sequence
  Description of Artificial Sequence: Synthetic oligonucleotide
ttcatttatagtaacttcaggc

SEQ ID NO: 501 - DNA, 22 bp, Artificial Sequence
  Description of Artificial Sequence: Synthetic oligonucleotide
tactctaattccagtgcttggt

SEQ ID NO: 502 - DNA, 22 bp, Artificial Sequence
  Description of Artificial Sequence: Synthetic oligonucleotide
atacatgtgaccatagagtgcg

SEQ ID NO: 503 - DNA, 22 bp, Artificial Sequence
  Description of Artificial Sequence: Synthetic oligonucleotide
tttagtgctgataccaaatcct

SEQ ID NO: 504 - DNA, 22 bp, Artificial Sequence
  Description of Artificial Sequence: Synthetic oligonucleotide
tttccatcaattagctcccgca

SEQ ID NO: 505 - DNA, 22 bp, Artificial Sequence
  Description of Artificial Sequence: Synthetic oligonucleotide
atgctctctcataaactctcgt

SEQ ID NO: 506 - DNA, 22 bp, Artificial Sequence
  Description of Artificial Sequence: Synthetic oligonucleotide
tacgatcagctccctatgggtt

SEQ ID NO: 507 - DNA, 22 bp, Artificial Sequence
  Description of Artificial Sequence: Synthetic oligonucleotide
atacattcagcaagtgtatcct

SEQ ID NO: 508 - DNA, 22 bp, Artificial Sequence
  Description of Artificial Sequence: Synthetic oligonucleotide
ttctcgtggttcagtatagcct

SEQ ID NO: 509 - DNA, 22 bp, Artificial Sequence
  Description of Artificial Sequence: Synthetic oligonucleotide
ttgcctcatcttctttagcctc

SEQ ID NO: 510 - DNA, 22 bp, Artificial Sequence
  Description of Artificial Sequence: Synthetic oligonucleotide
tttcaggaagaggtgggttccc

SEQ ID NO: 511 - DNA, 22 bp, Artificial Sequence
  Description of Artificial Sequence: Synthetic oligonucleotide
atatgccactatagcttcgggc

SEQ ID NO: 512 - DNA, 22 bp, Artificial Sequence
  Description of Artificial Sequence: Synthetic oligonucleotide
tatgtagaagggattaggtcct

SEQ ID NO: 513 - DNA, 22 bp, Artificial Sequence
  Description of Artificial Sequence: Synthetic oligonucleotide
taatagaaagggtgtatatctt

SEQ ID NO: 514 - DNA, 22 bp, Artificial Sequence
  Description of Artificial Sequence: Synthetic oligonucleotide
tttaggcagcactgtcattgca

SEQ ID NO: 515 - DNA, 22 bp, Artificial Sequence
  Description of Artificial Sequence: Synthetic oligonucleotide
ttaatatctcatctgcccggcc

SEQ ID NO: 516 - DNA, 22 bp, Artificial Sequence
  Description of Artificial Sequence: Synthetic oligonucleotide
atatgtgaaagaatcttcccgt

SEQ ID NO: 517 - DNA, 22 bp, Artificial Sequence
  Description of Artificial Sequence: Synthetic oligonucleotide
cttcttctggacttagattgct

SEQ ID NO: 518 - DNA, 22 bp, Artificial Sequence
  Description of Artificial Sequence: Synthetic oligonucleotide
ttattgtgaaatattggatcct

SEQ ID NO: 519 - DNA, 22 bp, Artificial Sequence
  Description of Artificial Sequence: Synthetic oligonucleotide
aatatatcttgctcagttgcct

SEQ ID NO: 520 - DNA, 22 bp, Artificial Sequence
  Description of Artificial Sequence: Synthetic oligonucleotide
tttctgagtggtcataactcct

SEQ ID NO: 521 - DNA, 22 bp, Artificial Sequence
  Description of Artificial Sequence: Synthetic oligonucleotide
tttctctcactggagattagct

SEQ ID NO: 522 - DNA, 22 bp, Artificial Sequence
  Description of Artificial Sequence: Synthetic oligonucleotide
atatgcttcagtgtctggagcc

SEQ ID NO: 523 - DNA, 22 bp, Artificial Sequence
  Description of Artificial Sequence: Synthetic oligonucleotide
ataagatgcacccatactggct

SEQ ID NO: 524 - DNA, 22 bp, Artificial Sequence
  Description of Artificial Sequence: Synthetic oligonucleotide
ttaagatcaaactctacaagct

SEQ ID NO: 525 - DNA, 22 bp, Artificial Sequence
  Description of Artificial Sequence: Synthetic oligonucleotide
tttcctcttaagagcaatcggt

SEQ ID NO: 526 - DNA, 22 bp, Artificial Sequence
  Description of Artificial Sequence: Synthetic oligonucleotide
ttctctccataaactgattccc

SEQ ID NO: 527 - DNA, 22 bp, Artificial Sequence
  Description of Artificial Sequence: Synthetic oligonucleotide
atagactggtcggtgacgtggt

SEQ ID NO: 528 - DNA, 22 bp, Artificial Sequence
  Description of Artificial Sequence: Synthetic oligonucleotide
tacattcacaaagttctctgcg

SEQ ID NO: 529 - DNA, 22 bp, Artificial Sequence
  Description of Artificial Sequence: Synthetic oligonucleotide
ttgtaatagacacacaggaggt

SEQ ID NO: 530 - DNA, 22 bp, Artificial Sequence
  Description of Artificial Sequence: Synthetic oligonucleotide
ttgtgcaaaggttcttaatgca

SEQ ID NO: 531 - DNA, 22 bp, Artificial Sequence
  Description of Artificial Sequence: Synthetic oligonucleotide
ttctagattcatacagcacgca

SEQ ID NO: 532 - DNA, 22 bp, Artificial Sequence
  Description of Artificial Sequence: Synthetic oligonucleotide
ttagtctcaaggacagactgcc

SEQ ID NO: 533 - DNA, 22 bp, Artificial Sequence
  Description of Artificial Sequence: Synthetic oligonucleotide
ttaagttgtgttctgaaagcct

SEQ ID NO: 534 - DNA, 22 bp, Artificial Sequence
  Description of Artificial Sequence: Synthetic oligonucleotide
ttaaataaactaagacgccgct

SEQ ID NO: 535 - DNA, 22 bp, Artificial Sequence
  Description of Artificial Sequence: Synthetic oligonucleotide
atttgacctcagaatgacggtg

SEQ ID NO: 536 - DNA, 22 bp, Artificial Sequence
  Description of Artificial Sequence: Synthetic oligonucleotide
atcacttaagaaattgggccca

SEQ ID NO: 537 - DNA, 22 bp, Artificial Sequence
  Description of Artificial Sequence: Synthetic oligonucleotide
ttctgacagcagttgtttacca

SEQ ID NO: 538 - DNA, 22 bp, Artificial Sequence
  Description of Artificial Sequence: Synthetic oligonucleotide
tatagaaaccatcaagagactg

SEQ ID NO: 539 - DNA, 22 bp, Artificial Sequence
  Description of Artificial Sequence: Synthetic oligonucleotide
taacaccttcatacagttcccg

SEQ ID NO: 540 - DNA, 22 bp, Artificial Sequence
  Description of Artificial Sequence: Synthetic oligonucleotide
ttggtagtttccttctgatggc

SEQ ID NO: 541 - DNA, 22 bp, Artificial Sequence
  Description of Artificial Sequence: Synthetic oligonucleotide
atattctgagactttgcatggt

SEQ ID NO: 542 - DNA, 22 bp, Artificial Sequence
  Description of Artificial Sequence: Synthetic oligonucleotide
taagactatgagagagaaaggg

SEQ ID NO: 543 - DNA, 22 bp, Artificial Sequence
  Description of Artificial Sequence: Synthetic oligonucleotide
atttgcagacaggtagagtggc

SEQ ID NO: 544 - DNA, 22 bp, Artificial Sequence
  Description of Artificial Sequence: Synthetic oligonucleotide
ttgtaagtactatttccttcct

SEQ ID NO: 545 - DNA, 22 bp, Artificial Sequence
  Description of Artificial Sequence: Synthetic oligonucleotide
ttaaattcctcatgcacctgcc

SEQ ID NO: 546 - DNA, 22 bp, Artificial Sequence
  Description of Artificial Sequence: Synthetic oligonucleotide
ataaatcgggttgctatctcca

SEQ ID NO: 547 - DNA, 22 bp, Artificial Sequence
  Description of Artificial Sequence: Synthetic oligonucleotide
tttaactcagacactgagagcc

SEQ ID NO: 548 - DNA, 22 bp, Artificial Sequence
  Description of Artificial Sequence: Synthetic oligonucleotide
tttaaccaggatccggtttccc

SEQ ID NO: 549 - DNA, 22 bp, Artificial Sequence
  Description of Artificial Sequence: Synthetic oligonucleotide
ttggtgatagaattgaagggct

SEQ ID NO: 550 - DNA, 22 bp, Artificial Sequence
  Description of Artificial Sequence: Synthetic oligonucleotide
ttcttcatggaataccaccggg

SEQ ID NO: 551 - DNA, 22 bp, Artificial Sequence
  Description of Artificial Sequence: Synthetic oligonucleotide
gttagatttgccactttgctgt

SEQ ID NO: 552 - DNA, 22 bp, Artificial Sequence
  Description of Artificial Sequence: Synthetic oligonucleotide
tttgggatcaggtgtaactctg

SEQ ID NO: 553 - DNA, 22 bp, Artificial Sequence
  Description of Artificial Sequence: Synthetic oligonucleotide
ttaatgacagccttcaccaggt

SEQ ID NO: 554 - DNA, 22 bp, Artificial Sequence
  Description of Artificial Sequence: Synthetic oligonucleotide
atttgtagtagaggttactggt

SEQ ID NO: 555 - DNA, 22 bp, Artificial Sequence
  Description of Artificial Sequence: Synthetic oligonucleotide
tttcacagtaagctttccaggt

SEQ ID NO: 556 - DNA, 22 bp, Artificial Sequence
  Description of Artificial Sequence: Synthetic oligonucleotide
atttaagatggtgaaggtgcca

SEQ ID NO: 557 - DNA, 22 bp, Artificial Sequence
  Description of Artificial Sequence: Synthetic oligonucleotide
ttgtaagatctgtcacagaccc

SEQ ID NO: 558 - DNA, 22 bp, Artificial Sequence
  Description of Artificial Sequence: Synthetic oligonucleotide
atctgtgattagatgacatcct

SEQ ID NO: 559 - DNA, 22 bp, Artificial Sequence
  Description of Artificial Sequence: Synthetic oligonucleotide
taattgactaacacgcctccga

SEQ ID NO: 560 - DNA, 22 bp, Artificial Sequence
  Description of Artificial Sequence: Synthetic oligonucleotide
ttcatgtttgggtgaagggctc

SEQ ID NO: 561 - DNA, 22 bp, Artificial Sequence
  Description of Artificial Sequence: Synthetic oligonucleotide
gttgtcatccataatatcagct

SEQ ID NO: 562 - DNA, 22 bp, Artificial Sequence
  Description of Artificial Sequence: Synthetic oligonucleotide
aataagaatggtttggtttggt

SEQ ID NO: 563 - DNA, 22 bp, Artificial Sequence
  Description of Artificial Sequence: Synthetic oligonucleotide
aatcccaaattggtaagtccct

SEQ ID NO: 564 - DNA, 22 bp, Artificial Sequence
  Description of Artificial Sequence: Synthetic oligonucleotide
taatacaatcaccaagggagcc

SEQ ID NO: 565 - DNA, 22 bp, Artificial Sequence
  Description of Artificial Sequence: Synthetic oligonucleotide
taatgctgtaattgcggaggcc

SEQ ID NO: 566 - DNA, 22 bp, Artificial Sequence
  Description of Artificial Sequence: Synthetic oligonucleotide
ttattgcctttacttctgtggg

SEQ ID NO: 567 - DNA, 22 bp, Artificial Sequence
  Description of Artificial Sequence: Synthetic oligonucleotide
atattcacacagtgacatggcg

SEQ ID NO: 568 - DNA, 22 bp, Artificial Sequence
  Description of Artificial Sequence: Synthetic oligonucleotide
ttatattctgggcctaggacct

SEQ ID NO: 569 - DNA, 22 bp, Artificial Sequence
  Description of Artificial Sequence: Synthetic oligonucleotide
tttattgctcttatattcagcc

SEQ ID NO: 570 - DNA, 22 bp, Artificial Sequence
  Description of Artificial Sequence: Synthetic oligonucleotide
tataccagttgctgcaaatcct

SEQ ID NO: 571 - DNA, 22 bp, Artificial Sequence
  Description of Artificial Sequence: Synthetic oligonucleotide
taaatagatgaccaaatcaggt

SEQ ID NO: 572 - DNA, 22 bp, Artificial Sequence
  Description of Artificial Sequence: Synthetic oligonucleotide
atttgccttgaggacatttgcc

SEQ ID NO: 573 - DNA, 22 bp, Artificial Sequence
  Description of Artificial Sequence: Synthetic oligonucleotide
tagtaggtaaacaggaaggcct

SEQ ID NO: 574 - DNA, 22 bp, Artificial Sequence
  Description of Artificial Sequence: Synthetic oligonucleotide
tttcccaagcaggaaggtccgt

SEQ ID NO: 575 - DNA, 22 bp, Artificial Sequence
  Description of Artificial Sequence: Synthetic oligonucleotide
aagaccgtagaagtcatagccc

SEQ ID NO: 576 - DNA, 22 bp, Artificial Sequence
  Description of Artificial Sequence: Synthetic oligonucleotide
ttaaccatttaggtgatgggca

SEQ ID NO: 577 - DNA, 22 bp, Artificial Sequence
  Description of Artificial Sequence: Synthetic oligonucleotide
tatttgagccattctgtgaccc

SEQ ID NO: 578 - DNA, 22 bp, Artificial Sequence
  Description of Artificial Sequence: Synthetic oligonucleotide
tttgcatttggtgataggtgca

SEQ ID NO: 579 - DNA, 22 bp, Artificial Sequence
  Description of Artificial Sequence: Synthetic oligonucleotide
attggtgtgggttgacctggcc

SEQ ID NO: 580 - DNA, 22 bp, Artificial Sequence
  Description of Artificial Sequence: Synthetic oligonucleotide
ttctaagctatatccatcggct

SEQ ID NO: 581 - DNA, 22 bp, Artificial Sequence
  Description of Artificial Sequence: Synthetic oligonucleotide
aagagagcggcaataaatgggc

SEQ ID NO: 582 - DNA, 22 bp, Artificial Sequence
  Description of Artificial Sequence: Synthetic oligonucleotide
taagaggagttcataatgggcc

SEQ ID NO: 583 - DNA, 22 bp, Artificial Sequence
  Description of Artificial Sequence: Synthetic oligonucleotide
aacaattcggagtttatacctg

SEQ ID NO: 584 - DNA, 22 bp, Artificial Sequence
  Description of Artificial Sequence: Synthetic oligonucleotide
ataggaggcagcagtaaatgca

SEQ ID NO: 585 - DNA, 22 bp, Artificial Sequence
  Description of Artificial Sequence: Synthetic oligonucleotide
ctaatgatggatactttggcct

SEQ ID NO: 586 - DNA, 22 bp, Artificial Sequence
  Description of Artificial Sequence: Synthetic oligonucleotide
attgataacctggctaatccca

SEQ ID NO: 587 - DNA, 22 bp, Artificial Sequence
  Description of Artificial Sequence: Synthetic oligonucleotide
ttagggttggacatgatatccc

SEQ ID NO: 588 - DNA, 22 bp, Artificial Sequence
  Description of Artificial Sequence: Synthetic oligonucleotide
atgcaggataaataacaaggcc

SEQ ID NO: 589 - DNA, 22 bp, Artificial Sequence
  Description of Artificial Sequence: Synthetic oligonucleotide
atactgtctcacaaattcccgc

SEQ ID NO: 590 - DNA, 22 bp, Artificial Sequence
  Description of Artificial Sequence: Synthetic oligonucleotide
atcttggttccaactgtctgat

SEQ ID NO: 591 - DNA, 22 bp, Artificial Sequence
  Description of Artificial Sequence: Synthetic oligonucleotide
atatgtaatggtgttcggtcca

SEQ ID NO: 592 - DNA, 22 bp, Artificial Sequence
  Description of Artificial Sequence: Synthetic oligonucleotide
tttgaggagtaggattattgct

SEQ ID NO: 593 - DNA, 22 bp, Artificial Sequence
  Description of Artificial Sequence: Synthetic oligonucleotide
attgggattcctcttcttagct

SEQ ID NO: 594 - DNA, 22 bp, Artificial Sequence
  Description of Artificial Sequence: Synthetic oligonucleotide
taatgatatcgatcacagggca

SEQ ID NO: 595 - DNA, 22 bp, Artificial Sequence
  Description of Artificial Sequence: Synthetic oligonucleotide
atcgattgcaagggaatctggt

SEQ ID NO: 596 - DNA, 22 bp, Artificial Sequence
  Description of Artificial Sequence: Synthetic oligonucleotide
ttattctctccattctgctcca

SEQ ID NO: 597 - DNA, 22 bp, Artificial Sequence
  Description of Artificial Sequence: Synthetic oligonucleotide
taaagttacaatgcagtcttgc

SEQ ID NO: 598 - DNA, 22 bp, Artificial Sequence
  Description of Artificial Sequence: Synthetic oligonucleotide
ttcttaacaaatagagaaaggc

SEQ ID NO: 599 - DNA, 22 bp, Artificial Sequence
  Description of Artificial Sequence: Synthetic oligonucleotide
aatgctgtggatttgctgagcc

SEQ ID NO: 600 - DNA, 22 bp, Artificial Sequence
  Description of Artificial Sequence: Synthetic oligonucleotide
tagtaaactcatataccctggc

SEQ ID NO: 601 - DNA, 22 bp, Artificial Sequence
  Description of Artificial Sequence: Synthetic oligonucleotide
atggagaattactttcacagga

SEQ ID NO: 602 - DNA, 22 bp, Artificial Sequence
  Description of Artificial Sequence: Synthetic oligonucleotide
tttgggaaggaagggcaaggct

SEQ ID NO: 603 - DNA, 22 bp, Artificial Sequence
  Description of Artificial Sequence: Synthetic oligonucleotide
ttctcatccaggaagaggaccc

SEQ ID NO: 604 - DNA, 22 bp, Artificial Sequence
  Description of Artificial Sequence: Synthetic oligonucleotide
aataagctctctttcctctgcg

SEQ ID NO: 605 - DNA, 22 bp, Artificial Sequence
  Description of Artificial Sequence: Synthetic oligonucleotide
ttgtgacataggattatttgga

SEQ ID NO: 606 - DNA, 22 bp, Artificial Sequence
  Description of Artificial Sequence: Synthetic oligonucleotide
tttctgaaggagctcttgggcc

SEQ ID NO: 607 - DNA, 22 bp, Artificial Sequence
  Description of Artificial Sequence: Synthetic oligonucleotide
atcagatgaaaggtggtgatgg

SEQ ID NO: 608 - DNA, 22 bp, Artificial Sequence
  Description of Artificial Sequence: Synthetic oligonucleotide
aatgacaatctctctatttccc

SEQ ID NO: 609 - DNA, 22 bp, Artificial Sequence
  Description of Artificial Sequence: Synthetic oligonucleotide
ttcagtaaaggtgtttccgtct

SEQ ID NO: 610 - DNA, 22 bp, Artificial Sequence
  Description of Artificial Sequence: Synthetic oligonucleotide
atatcatagagggaggaagcca

SEQ ID NO: 611 - DNA, 22 bp, Artificial Sequence
  Description of Artificial Sequence: Synthetic oligonucleotide
tttcagtgatctgttgtggcag

SEQ ID NO: 612 - DNA, 22 bp, Artificial Sequence
  Description of Artificial Sequence: Synthetic oligonucleotide
atggtccaaggtataatttgca

SEQ ID NO: 613 - DNA, 22 bp, Artificial Sequence
  Description of Artificial Sequence: Synthetic oligonucleotide
attgctgactatgatagaggca

SEQ ID NO: 614 - DNA, 22 bp, Artificial Sequence
  Description of Artificial Sequence: Synthetic oligonucleotide
ttattccatacagccctggccc

SEQ ID NO: 615 - DNA, 22 bp, Artificial Sequence
  Description of Artificial Sequence: Synthetic oligonucleotide
ttggaaactagcattctttcca

SEQ ID NO: 616 - DNA, 22 bp, Artificial Sequence
  Description of Artificial Sequence: Synthetic oligonucleotide
atactgttgctcttagggcggt

SEQ ID NO: 617 - DNA, 22 bp, Artificial Sequence
  Description of Artificial Sequence: Synthetic oligonucleotide
ttagatattgagagtttgtgcc

SEQ ID NO: 618 - DNA, 22 bp, Artificial Sequence
  Description of Artificial Sequence: Synthetic oligonucleotide
tttggttcttggatcttctgcc

SEQ ID NO: 619 - DNA, 22 bp, Artificial Sequence
  Description of Artificial Sequence: Synthetic oligonucleotide
tttcaacttgagattgtctgct

SEQ ID NO: 620 - DNA, 22 bp, Artificial Sequence
  Description of Artificial Sequence: Synthetic oligonucleotide
ttaaccttctctacttcctgca

SEQ ID NO: 621 - DNA, 22 bp, Artificial Sequence
  Description of Artificial Sequence: Synthetic oligonucleotide
ctgcaatatgtctctatgccgc

SEQ ID NO: 622 - DNA, 22 bp, Artificial Sequence
  Description of Artificial Sequence: Synthetic oligonucleotide
tttgcagaccatagtgaaggct

SEQ ID NO: 623 - DNA, 22 bp, Artificial Sequence
  Description of Artificial Sequence: Synthetic oligonucleotide
gaagcctttggtcaggtgctcc

SEQ ID NO: 624 - DNA, 22 bp, Artificial Sequence
  Description of Artificial Sequence: Synthetic oligonucleotide
tttaggtgtgaaatccacaggt

SEQ ID NO: 625 - DNA, 22 bp, Artificial Sequence
  Description of Artificial Sequence: Synthetic oligonucleotide
tatacttcgagaatggtctcct

SEQ ID NO: 626 - DNA, 22 bp, Artificial Sequence
  Description of Artificial Sequence: Synthetic oligonucleotide
tattgggtagacaaataggcct

SEQ ID NO: 627 - DNA, 22 bp, Artificial Sequence
  Description of Artificial Sequence: Synthetic oligonucleotide
tttctttggcactttcattccc

SEQ ID NO: 628 - DNA, 22 bp, Artificial Sequence
  Description of Artificial Sequence: Synthetic oligonucleotide
tacacttgggtgactcagggat

SEQ ID NO: 629 - DNA, 22 bp, Artificial Sequence
  Description of Artificial Sequence: Synthetic oligonucleotide
caaacatggccaggtagagggc

SEQ ID NO: 630 - DNA, 22 bp, Artificial Sequence
  Description of Artificial Sequence: Synthetic oligonucleotide
ttagcacccatagatagaggcc

SEQ ID NO: 631 - DNA, 22 bp, Artificial Sequence
  Description of Artificial Sequence: Synthetic oligonucleotide
aaccacatgcaaagaaagggcc

SEQ ID NO: 632 - DNA, 22 bp, Artificial Sequence
  Description of Artificial Sequence: Synthetic oligonucleotide
ctgcttcatcacatgggcaggt

SEQ ID NO: 633 - DNA, 22 bp, Artificial Sequence
  Description of Artificial Sequence: Synthetic oligonucleotide
ttgaagaagcagacaaactgct

SEQ ID NO: 634 - DNA, 22 bp, Artificial Sequence
  Description of Artificial Sequence: Synthetic oligonucleotide
taaagcattgattgactgagcc

SEQ ID NO: 635 - DNA, 22 bp, Artificial Sequence
  Description of Artificial Sequence: Synthetic oligonucleotide
aaccacactcagcgtatcgggc

SEQ ID NO: 636 - DNA, 22 bp, Artificial Sequence
  Description of Artificial Sequence: Synthetic oligonucleotide
tatagtcatggagtccagcctt

SEQ ID NO: 637 - DNA, 22 bp, Artificial Sequence
  Description of Artificial Sequence: Synthetic oligonucleotide
aagttatatgacccatatccca

SEQ ID NO: 638 - DNA, 22 bp, Artificial Sequence
  Description of Artificial Sequence: Synthetic oligonucleotide
tatttctcagatatcgcttcca

SEQ ID NO: 639 - DNA, 22 bp, Artificial Sequence
  Description of Artificial Sequence: Synthetic oligonucleotide
atatagtcaccaatgttcagca

SEQ ID NO: 640 - DNA, 22 bp, Artificial Sequence
  Description of Artificial Sequence: Synthetic oligonucleotide
tatttccaccatcaagggtccc

SEQ ID NO: 641 - DNA, 22 bp, Artificial Sequence
  Description of Artificial Sequence: Synthetic oligonucleotide
ataaccaagtagctctttccca

SEQ ID NO: 642 - DNA, 22 bp, Artificial Sequence
  Description of Artificial Sequence: Synthetic oligonucleotide
taaacaaacagtcccagatccg

SEQ ID NO: 643 - DNA, 22 bp, Artificial Sequence
  Description of Artificial Sequence: Synthetic oligonucleotide
aatacatagaggaggagtgcca

SEQ ID NO: 644 - DNA, 22 bp, Artificial Sequence
  Description of Artificial Sequence: Synthetic oligonucleotide
ttattaattagcacaattaggt

SEQ ID NO: 645 - DNA, 22 bp, Artificial Sequence
  Description of Artificial Sequence: Synthetic oligonucleotide
atatcaattagggctctctcct

SEQ ID NO: 646 - DNA, 22 bp, Artificial Sequence
  Description of Artificial Sequence: Synthetic oligonucleotide
taagtgtttcctatctactggc

SEQ ID NO: 647 - DNA, 22 bp, Artificial Sequence
  Description of Artificial Sequence: Synthetic oligonucleotide
atctgttgagactgtatgagct

SEQ ID NO: 648 - DNA, 22 bp, Artificial Sequence
  Description of Artificial Sequence: Synthetic oligonucleotide
tttgtcattgctgaaagttcgc

SEQ ID NO: 649 - DNA, 22 bp, Artificial Sequence
  Description of Artificial Sequence: Synthetic oligonucleotide
atttcatccacctggaactccg

SEQ ID NO: 650 - DNA, 22 bp, Artificial Sequence
  Description of Artificial Sequence: Synthetic oligonucleotide
taatacttcacaagtctctcca

SEQ ID NO: 651 - DNA, 22 bp, Artificial Sequence
  Description of Artificial Sequence: Synthetic oligonucleotide
ttacagttctggcaaatttccc

SEQ ID NO: 652 - DNA, 22 bp, Artificial Sequence
  Description of Artificial Sequence: Synthetic oligonucleotide
aatattaaagatgaggattcgg

SEQ ID NO: 653 - DNA, 22 bp, Artificial Sequence
  Description of Artificial Sequence: Synthetic oligonucleotide
gtagaagctcatgttctctgca

SEQ ID NO: 654 - DNA, 22 bp, Artificial Sequence
  Description of Artificial Sequence: Synthetic oligonucleotide
tttgagaatgtattgcctccga

SEQ ID NO: 655 - DNA, 22 bp, Artificial Sequence
  Description of Artificial Sequence: Synthetic oligonucleotide
aagtaggatccatcggtgaggc

SEQ ID NO: 656 - DNA, 22 bp, Artificial Sequence
  Description of Artificial Sequence: Synthetic oligonucleotide
taatgatctcctcgcgaagcgg

SEQ ID NO: 657 - DNA, 22 bp, Artificial Sequence
  Description of Artificial Sequence: Synthetic oligonucleotide
atttggcagaaacatggtagcc

SEQ ID NO: 658 - DNA, 22 bp, Artificial Sequence
  Description of Artificial Sequence: Synthetic oligonucleotide
atcatcctttgcatcttgtgct

SEQ ID NO: 659 - DNA, 22 bp, Artificial Sequence
  Description of Artificial Sequence: Synthetic oligonucleotide
tattaaatgacactgctttggg

SEQ ID NO: 660 - DNA, 22 bp, Artificial Sequence
  Description of Artificial Sequence: Synthetic oligonucleotide
tattcttgtctcgtggtatggc

SEQ ID NO: 661 - DNA, 22 bp, Artificial Sequence
  Description of Artificial Sequence: Synthetic oligonucleotide
tatgtttacagactactgtcct

SEQ ID NO: 662 - DNA, 22 bp, Artificial Sequence
  Description of Artificial Sequence: Synthetic oligonucleotide
ttatccacagcaatgactcggc

SEQ ID NO: 663 - DNA, 22 bp, Artificial Sequence
  Description of Artificial Sequence: Synthetic oligonucleotide
ttccgtaaagacgtagagtgcg

SEQ ID NO: 664 - DNA, 22 bp, Artificial Sequence
  Description of Artificial Sequence: Synthetic oligonucleotide
aatgatcaggaaagtttcagga

SEQ ID NO: 665 - DNA, 22 bp, Artificial Sequence
  Description of Artificial Sequence: Synthetic oligonucleotide
ttacacaaagggtcacttcctc

SEQ ID NO: 666 - DNA, 22 bp, Artificial Sequence
  Description of Artificial Sequence: Synthetic oligonucleotide
ttacacagacgtttaattagct

SEQ ID NO: 667 - DNA, 22 bp, Artificial Sequence
  Description of Artificial Sequence: Synthetic oligonucleotide
tacttgctttgggctttatggt

SEQ ID NO: 668 - DNA, 22 bp, Artificial Sequence
  Description of Artificial Sequence: Synthetic oligonucleotide
ttgtatacttggtgacagcctt

SEQ ID NO: 669 - DNA, 22 bp, Artificial Sequence
  Description of Artificial Sequence: Synthetic oligonucleotide
aatcttctggagagtctgtgcc

SEQ ID NO: 670 - DNA, 22 bp, Artificial Sequence
  Description of Artificial Sequence: Synthetic oligonucleotide
atttctctttcttctccagccc

SEQ ID NO: 671 - DNA, 22 bp, Artificial Sequence
  Description of Artificial Sequence: Synthetic oligonucleotide
ttatctactaagtcacacagct

SEQ ID NO: 672 - DNA, 22 bp, Artificial Sequence
  Description of Artificial Sequence: Synthetic oligonucleotide
tttagggagttaagtctctgct

SEQ ID NO: 673 - DNA, 22 bp, Artificial Sequence
  Description of Artificial Sequence: Synthetic oligonucleotide
atctagaaatggaaccactgct

SEQ ID NO: 674 - DNA, 22 bp, Artificial Sequence
  Description of Artificial Sequence: Synthetic oligonucleotide
tttcacatttatgtagtgccgt

SEQ ID NO: 675 - DNA, 22 bp, Artificial Sequence
  Description of Artificial Sequence: Synthetic oligonucleotide
atgggataagatttctaaaccc

SEQ ID NO: 676 - DNA, 22 bp, Artificial Sequence
  Description of Artificial Sequence: Synthetic oligonucleotide
atttattccaaatcctatgcct

SEQ ID NO: 677 - DNA, 22 bp, Artificial Sequence
  Description of Artificial Sequence: Synthetic oligonucleotide
tttcctttgagggtagccagtt

SEQ ID NO: 678 - DNA, 22 bp, Artificial Sequence
  Description of Artificial Sequence: Synthetic oligonucleotide
atatttacaagctttgggccct

SEQ ID NO: 679 - DNA, 22 bp, Artificial Sequence
  Description of Artificial Sequence: Synthetic oligonucleotide
tttagttcgaggattgttcggc

SEQ ID NO: 680 - DNA, 22 bp, Artificial Sequence
  Description of Artificial Sequence: Synthetic oligonucleotide
ttcttctgtttcatcctgcggt

SEQ ID NO: 681 - DNA, 22 bp, Artificial Sequence
  Description of Artificial Sequence: Synthetic oligonucleotide
aaccttcatcatccattgtgct

SEQ ID NO: 682 - DNA, 22 bp, Artificial Sequence
  Description of Artificial Sequence: Synthetic oligonucleotide
ttgtctgcaatggaagggacgg

SEQ ID NO: 683 - DNA, 22 bp, Artificial Sequence
  Description of Artificial Sequence: Synthetic oligonucleotide
tatagtgatgccgttgtcagtg

SEQ ID NO: 684 - DNA, 22 bp, Artificial Sequence
  Description of Artificial Sequence: Synthetic oligonucleotide
atttccctaggcactctcactg

SEQ ID NO: 685 - DNA, 22 bp, Artificial Sequence
  Description of Artificial Sequence: Synthetic oligonucleotide
ttagaaggtacagtcctctgct

SEQ ID NO: 686 - DNA, 22 bp, Artificial Sequence
  Description of Artificial Sequence: Synthetic oligonucleotide
tttgataatgtgactgtgtggc

SEQ ID NO: 687 - DNA, 22 bp, Artificial Sequence
  Description of Artificial Sequence: Synthetic oligonucleotide
tagaagtccctcatgatctggt

SEQ ID NO: 688 - DNA, 22 bp, Artificial Sequence
  Description of Artificial Sequence: Synthetic oligonucleotide
tttagatgcaaggtaggtgcct

SEQ ID NO: 689 - DNA, 22 bp, Artificial Sequence
  Description of Artificial Sequence: Synthetic oligonucleotide
ttgattgatcactctacaagcc

SEQ ID NO: 690 - DNA, 22 bp, Artificial Sequence
  Description of Artificial Sequence: Synthetic oligonucleotide
attgaccagcacatattctgcc

SEQ ID NO: 691 - DNA, 22 bp, Artificial Sequence
  Description of Artificial Sequence: Synthetic oligonucleotide
attaaatccagcagctctagct

SEQ ID NO: 692 - DNA, 22 bp, Artificial Sequence
  Description of Artificial Sequence: Synthetic oligonucleotide
attgtttgggttggtgacagcc

SEQ ID NO: 693 - DNA, 22 bp, Artificial Sequence
  Description of Artificial Sequence: Synthetic oligonucleotide
tctgcaattgactttgtccgag

SEQ ID NO: 694 - DNA, 22 bp, Artificial Sequence
  Description of Artificial Sequence: Synthetic oligonucleotide
taattcttctcatcacgggcca

SEQ ID NO: 695 - DNA, 22 bp, Artificial Sequence
  Description of Artificial Sequence: Synthetic oligonucleotide
tattctgggtataatggctcgg

SEQ ID NO: 696 - DNA, 22 bp, Artificial Sequence
  Description of Artificial Sequence: Synthetic oligonucleotide
atagaggtggtttaaatcagcc

SEQ ID NO: 697 - DNA, 22 bp, Artificial Sequence
  Description of Artificial Sequence: Synthetic oligonucleotide
tttaagttcagcaattacagca

SEQ ID NO: 698 - DNA, 22 bp, Artificial Sequence
  Description of Artificial Sequence: Synthetic oligonucleotide
ataatcaatcgcgtttggacct

SEQ ID NO: 699 - DNA, 22 bp, Artificial Sequence
  Description of Artificial Sequence: Synthetic oligonucleotide
atagccaacagtagcatgtggc

SEQ ID NO: 700 - DNA, 22 bp, Artificial Sequence
  Description of Artificial Sequence: Synthetic oligonucleotide
tttaggatcagatttatctgct

SEQ ID NO: 701 - DNA, 22 bp, Artificial Sequence
  Description of Artificial Sequence: Synthetic oligonucleotide
ttaatcagatataatctgaggg

SEQ ID NO: 702 - DNA, 22 bp, Artificial Sequence
  Description of Artificial Sequence: Synthetic oligonucleotide
atagtctcaaatgttgtttcca

SEQ ID NO: 703 - DNA, 22 bp, Artificial Sequence
  Description of Artificial Sequence: Synthetic oligonucleotide
ttaaacactcagaaacaaacca

SEQ ID NO: 704 - DNA, 22 bp, Artificial Sequence
  Description of Artificial Sequence: Synthetic oligonucleotide
tattgtgtcaatttcactggct

SEQ ID NO: 705 - DNA, 22 bp, Artificial Sequence
  Description of Artificial Sequence: Synthetic oligonucleotide
atattgtgtcaatttcactggc

SEQ ID NO: 706 - DNA, 22 bp, Artificial Sequence
  Description of Artificial Sequence: Synthetic oligonucleotide
tattgggtacacactgtggcca

SEQ ID NO: 707 - DNA, 22 bp, Artificial Sequence
  Description of Artificial Sequence: Synthetic oligonucleotide
atcttagttgggactatttgca

SEQ ID NO: 708 - DNA, 22 bp, Artificial Sequence
  Description of Artificial Sequence: Synthetic oligonucleotide
gttaagtcagactctccgtggt

SEQ ID NO: 709 - DNA, 22 bp, Artificial Sequence
  Description of Artificial Sequence: Synthetic oligonucleotide
taagagactgatactggatcct

SEQ ID NO: 710 - DNA, 22 bp, Artificial Sequence
  Description of Artificial Sequence: Synthetic oligonucleotide
atcgagatacttgtgggtggcg

SEQ ID NO: 711 - DNA, 22 bp, Artificial Sequence
  Description of Artificial Sequence: Synthetic oligonucleotide
tttacgtaagcattccagggct

SEQ ID NO: 712 - DNA, 22 bp, Artificial Sequence
  Description of Artificial Sequence: Synthetic oligonucleotide
tatagagtttgtctagaagcct

SEQ ID NO: 713 - DNA, 22 bp, Artificial Sequence
  Description of Artificial Sequence: Synthetic oligonucleotide
atattcatggagaatagcagga

SEQ ID NO: 714 - DNA, 22 bp, Artificial Sequence
  Description of Artificial Sequence: Synthetic oligonucleotide
ctgtgggtataagcataactcc

SEQ ID NO: 715 - DNA, 22 bp, Artificial Sequence
  Description of Artificial Sequence: Synthetic oligonucleotide
tagttacaaccgcaaatgtcac

SEQ ID NO: 716 - DNA, 22 bp, Artificial Sequence
  Description of Artificial Sequence: Synthetic oligonucleotide
ataattatgctctcaaacagcc

SEQ ID NO: 717 - DNA, 22 bp, Artificial Sequence
  Description of Artificial Sequence: Synthetic oligonucleotide
ttcatgaaggtatctaagcgca

SEQ ID NO: 718 - DNA, 22 bp, Artificial Sequence
  Description of Artificial Sequence: Synthetic oligonucleotide
ataaagaaacaatattcccgcc

SEQ ID NO: 719 - DNA, 22 bp, Artificial Sequence
  Description of Artificial Sequence: Synthetic oligonucleotide
tttgcagatgggtgccagaggt

SEQ ID NO: 720 - DNA, 22 bp, Artificial Sequence
  Description of Artificial Sequence: Synthetic oligonucleotide
ttcttcagttgcttagagggcc

SEQ ID NO: 721 - DNA, 22 bp, Artificial Sequence
  Description of Artificial Sequence: Synthetic oligonucleotide
gaaaggaaggccataatcttcc

SEQ ID NO: 722 - DNA, 22 bp, Artificial Sequence
  Description of Artificial Sequence: Synthetic oligonucleotide
tattgttatcaactttggagca

SEQ ID NO: 723 - DNA, 22 bp, Artificial Sequence
  Description of Artificial Sequence: Synthetic oligonucleotide
tttaacaatccaaagacaggcc

SEQ ID NO: 724 - DNA, 22 bp, Artificial Sequence
  Description of Artificial Sequence: Synthetic oligonucleotide
atacagtggctcaatttctgcc

SEQ ID NO: 725 - DNA, 22 bp, Artificial Sequence
  Description of Artificial Sequence: Synthetic oligonucleotide
ttgtagaagcatgtgaactggg

SEQ ID NO: 726 - DNA, 22 bp, Artificial Sequence
  Description of Artificial Sequence: Synthetic oligonucleotide
tatgtctataatccactgattg

SEQ ID NO: 727 - DNA, 22 bp, Artificial Sequence
  Description of Artificial Sequence: Synthetic oligonucleotide
ttattgagatgaatgcattggt

SEQ ID NO: 728 - DNA, 22 bp, Artificial Sequence
  Description of Artificial Sequence: Synthetic oligonucleotide
ttgctatttgtatattctcccg

SEQ ID NO: 729 - DNA, 22 bp, Artificial Sequence
  Description of Artificial Sequence: Synthetic oligonucleotide
atttcacaacatttcaacagca

SEQ ID NO: 730 - DNA, 22 bp, Artificial Sequence
  Description of Artificial Sequence: Synthetic oligonucleotide
aatacggttgagattctggccc

SEQ ID NO: 731 - DNA, 22 bp, Artificial Sequence
  Description of Artificial Sequence: Synthetic oligonucleotide
tactactagaggaacaaactgg

SEQ ID NO: 732 - DNA, 22 bp, Artificial Sequence
  Description of Artificial Sequence: Synthetic oligonucleotide
aatagtggcgacagtatacggc

SEQ ID NO: 733 - DNA, 22 bp, Artificial Sequence
  Description of Artificial Sequence: Synthetic oligonucleotide
taagctgtacgggtcctcttat

SEQ ID NO: 734 - DNA, 22 bp, Artificial Sequence
  Description of Artificial Sequence: Synthetic oligonucleotide
tttcactagggctgtcactgcc

SEQ ID NO: 735 - DNA, 22 bp, Artificial Sequence
  Description of Artificial Sequence: Synthetic oligonucleotide
ttaccctataaggtccaatgga

SEQ ID NO: 736 - DNA, 22 bp, Artificial Sequence
  Description of Artificial Sequence: Synthetic oligonucleotide
attcctattaatataccgattc

SEQ ID NO: 737 - DNA, 22 bp, Artificial Sequence
  Description of Artificial Sequence: Synthetic oligonucleotide
ttgaagaagaacacgggcaggg

SEQ ID NO: 738 - DNA, 22 bp, Artificial Sequence
  Description of Artificial Sequence: Synthetic oligonucleotide
ttatatagctccatggtggcct

SEQ ID NO: 739 - DNA, 22 bp, Artificial Sequence
  Description of Artificial Sequence: Synthetic oligonucleotide
atttgatttaggtctgtcagct

SEQ ID NO: 740 - DNA, 22 bp, Artificial Sequence
  Description of Artificial Sequence: Synthetic oligonucleotide
taagattctgcaatctgctcct

SEQ ID NO: 741 - DNA, 22 bp, Artificial Sequence
  Description of Artificial Sequence: Synthetic oligonucleotide
attaccaaggacactctatctg

SEQ ID NO: 742 - DNA, 22 bp, Artificial Sequence
  Description of Artificial Sequence: Synthetic oligonucleotide
aattcctgagacctcttaacca

SEQ ID NO: 743 - DNA, 22 bp, Artificial Sequence
  Description of Artificial Sequence: Synthetic oligonucleotide
tttcaccaaatcatactgtccc

SEQ ID NO: 744 - DNA, 22 bp, Artificial Sequence
  Description of Artificial Sequence: Synthetic oligonucleotide
ataatgctccacacactgtcgg

SEQ ID NO: 745 - DNA, 22 bp, Artificial Sequence
  Description of Artificial Sequence: Synthetic oligonucleotide
tttgcatatgatctcgaaacca

SEQ ID NO: 746 - DNA, 22 bp, Artificial Sequence
  Description of Artificial Sequence: Synthetic oligonucleotide
tttaacagagactttgttgccc

SEQ ID NO: 747 - DNA, 22 bp, Artificial Sequence
  Description of Artificial Sequence: Synthetic oligonucleotide
ttataatttctggaattggcca

SEQ ID NO: 748 - DNA, 22 bp, Artificial Sequence
  Description of Artificial Sequence: Synthetic oligonucleotide
ttatgtttagtccaactaagga

SEQ ID NO: 749 - DNA, 22 bp, Artificial Sequence
  Description of Artificial Sequence: Synthetic oligonucleotide
atattcataaatacacacagca

SEQ ID NO: 750 - DNA, 22 bp, Artificial Sequence
  Description of Artificial Sequence: Synthetic oligonucleotide
tattaagagagtctgtgctgcc

SEQ ID NO: 751 - DNA, 22 bp, Artificial Sequence
  Description of Artificial Sequence: Synthetic oligonucleotide
taaccaagaccgagacgatggc

SEQ ID NO: 752 - DNA, 22 bp, Artificial Sequence
  Description of Artificial Sequence: Synthetic oligonucleotide
atgtaatacggcgtgattgcca

SEQ ID NO: 753 - DNA, 22 bp, Artificial Sequence
  Description of Artificial Sequence: Synthetic oligonucleotide
taaaggcccttgatggacggcg

SEQ ID NO: 754 - DNA, 22 bp, Artificial Sequence
  Description of Artificial Sequence: Synthetic oligonucleotide
atagcgtcagaggtaaccacgc

SEQ ID NO: 755 - DNA, 22 bp, Artificial Sequence
  Description of Artificial Sequence: Synthetic oligonucleotide
aatattcttcaagacgttgcct

SEQ ID NO: 756 - DNA, 22 bp, Artificial Sequence
  Description of Artificial Sequence: Synthetic oligonucleotide
atatcgatccagtttcctggcc

SEQ ID NO: 757 - DNA, 22 bp, Artificial Sequence
  Description of Artificial Sequence: Synthetic oligonucleotide
tattcgttgaagtttcatgggc

SEQ ID NO: 758 - DNA, 22 bp, Artificial Sequence
  Description of Artificial Sequence: Synthetic oligonucleotide
atctcttctcacaatgcctgtt

SEQ ID NO: 759 - DNA, 22 bp, Artificial Sequence
  Description of Artificial Sequence: Synthetic oligonucleotide
tttctcaaagtgtttctggcgg

SEQ ID NO: 760 - DNA, 22 bp, Artificial Sequence
  Description of Artificial Sequence: Synthetic oligonucleotide
atgtacctccacaagagcaggt

SEQ ID NO: 761 - DNA, 22 bp, Artificial Sequence
  Description of Artificial Sequence: Synthetic oligonucleotide
taagtttctgagactcagtcct

SEQ ID NO: 762 - DNA, 22 bp, Artificial Sequence
  Description of Artificial Sequence: Synthetic oligonucleotide
gataatatacacatgaaggcca

SEQ ID NO: 763 - DNA, 22 bp, Artificial Sequence
  Description of Artificial Sequence: Synthetic oligonucleotide
attccatgtaagagtaaaggca

SEQ ID NO: 764 - DNA, 22 bp, Artificial Sequence
  Description of Artificial Sequence: Synthetic oligonucleotide
tttgtctttgtctccatgtggc

SEQ ID NO: 765 - DNA, 22 bp, Artificial Sequence
  Description of Artificial Sequence: Synthetic oligonucleotide
ttaaggtgtagtgacataggct

SEQ ID NO: 766 - DNA, 22 bp, Artificial Sequence
  Description of Artificial Sequence: Synthetic oligonucleotide
tttgcacttgtaattggcttcc

SEQ ID NO: 767 - DNA, 22 bp, Artificial Sequence
  Description of Artificial Sequence: Synthetic oligonucleotide
attgagtttaatattcactgcg

SEQ ID NO: 768 - DNA, 22 bp, Artificial Sequence
  Description of Artificial Sequence: Synthetic oligonucleotide
agaactagacacttaatttggt

SEQ ID NO: 769 - DNA, 22 bp, Artificial Sequence
  Description of Artificial Sequence: Synthetic oligonucleotide
atttggtgttacaagggcacgt

SEQ ID NO: 770 - DNA, 22 bp, Artificial Sequence
  Description of Artificial Sequence: Synthetic oligonucleotide
tattgtatagatggaggctgcg

SEQ ID NO: 771 - DNA, 22 bp, Artificial Sequence
  Description of Artificial Sequence: Synthetic oligonucleotide
taaatgccaaagagactatccc

SEQ ID NO: 772 - DNA, 22 bp, Artificial Sequence
  Description of Artificial Sequence: Synthetic oligonucleotide
ttatttctaggtccctgcggct

SEQ ID NO: 773 - DNA, 22 bp, Artificial Sequence
  Description of Artificial Sequence: Synthetic oligonucleotide
tttgcaatgcagactctgttgc

SEQ ID NO: 774 - DNA, 22 bp, Artificial Sequence
  Description of Artificial Sequence: Synthetic oligonucleotide
tttctccatgatttctacccgt

SEQ ID NO: 775 - DNA, 22 bp, Artificial Sequence
  Description of Artificial Sequence: Synthetic oligonucleotide
aagtgtatgttccaatgaccgg

SEQ ID NO: 776 - DNA, 22 bp, Artificial Sequence
  Description of Artificial Sequence: Synthetic oligonucleotide
atcttcaactatagaatgtcct

SEQ ID NO: 777 - DNA, 22 bp, Artificial Sequence
  Description of Artificial Sequence: Synthetic oligonucleotide
atggttaaggtcaaagtttggc

SEQ ID NO: 778 - DNA, 22 bp, Artificial Sequence
  Description of Artificial Sequence: Synthetic oligonucleotide
tagatacaagaaagaggtggcc

SEQ ID NO: 779 - DNA, 22 bp, Artificial Sequence
  Description of Artificial Sequence: Synthetic oligonucleotide
ttccaaaggcacaataacacca

SEQ ID NO: 780 - DNA, 22 bp, Artificial Sequence
  Description of Artificial Sequence: Synthetic oligonucleotide
taatgccaatagttagtgagtc

SEQ ID NO: 781 - DNA, 22 bp, Artificial Sequence
  Description of Artificial Sequence: Synthetic oligonucleotide
atcattattgggagaacatgga

SEQ ID NO: 782 - DNA, 22 bp, Artificial Sequence
  Description of Artificial Sequence: Synthetic oligonucleotide
atttaacacggcaccaatgctg

SEQ ID NO: 783 - DNA, 22 bp, Artificial Sequence
  Description of Artificial Sequence: Synthetic oligonucleotide
ttactgatccagatgttgtcca

SEQ ID NO: 784 - DNA, 22 bp, Artificial Sequence
  Description of Artificial Sequence: Synthetic oligonucleotide
tttctgaatgagctcctgtccc

SEQ ID NO: 785 - DNA, 22 bp, Artificial Sequence
  Description of Artificial Sequence: Synthetic oligonucleotide
aacggtttcggtgcagggagcc

SEQ ID NO: 786 - DNA, 22 bp, Artificial Sequence
  Description of Artificial Sequence: Synthetic oligonucleotide
attgtcaaagccttcctggcgc

SEQ ID NO: 787 - DNA, 22 bp, Artificial Sequence
  Description of Artificial Sequence: Synthetic oligonucleotide
ttgttctctaggtagagccggc

SEQ ID NO: 788 - DNA, 22 bp, Artificial Sequence
  Description of Artificial Sequence: Synthetic oligonucleotide
ttatgtacttctagcatggcct

SEQ ID NO: 789 - DNA, 22 bp, Artificial Sequence
  Description of Artificial Sequence: Synthetic oligonucleotide
tatgtctctgactttacctgca

SEQ ID NO: 790 - DNA, 22 bp, Artificial Sequence
  Description of Artificial Sequence: Synthetic oligonucleotide
attcttgcttattcagtgggcg

SEQ ID NO: 791 - DNA, 22 bp, Artificial Sequence
  Description of Artificial Sequence: Synthetic oligonucleotide
atttatttgagctttctcacga

SEQ ID NO: 792 - DNA, 22 bp, Artificial Sequence
  Description of Artificial Sequence: Synthetic oligonucleotide
ttaatgtagtccttgacatgct

SEQ ID NO: 793 - DNA, 22 bp, Artificial Sequence
  Description of Artificial Sequence: Synthetic oligonucleotide
tatgtcatacatttcagcaggt

SEQ ID NO: 794 - DNA, 22 bp, Artificial Sequence
  Description of Artificial Sequence: Synthetic oligonucleotide
taatacagggtgaccatcgcgg

SEQ ID NO: 795 - DNA, 22 bp, Artificial Sequence
  Description of Artificial Sequence: Synthetic oligonucleotide
atgtgttagataatgggaggca

SEQ ID NO: 796 - DNA, 22 bp, Artificial Sequence
  Description of Artificial Sequence: Synthetic oligonucleotide
aatgttcagcagttctctcggg

SEQ ID NO: 797 - DNA, 22 bp, Artificial Sequence
  Description of Artificial Sequence: Synthetic oligonucleotide
tatgactaaattgttggtggcc

SEQ ID NO: 798 - DNA, 22 bp, Artificial Sequence
  Description of Artificial Sequence: Synthetic oligonucleotide
attaagggagatctagtgctta

SEQ ID NO: 799 - DNA, 22 bp, Artificial Sequence
  Description of Artificial Sequence: Synthetic oligonucleotide
atttccatttggattatacgct

SEQ ID NO: 800 - DNA, 22 bp, Artificial Sequence
  Description of Artificial Sequence: Synthetic oligonucleotide
tttgagattgggatgcagcctg

SEQ ID NO: 801 - DNA, 22 bp, Artificial Sequence
  Description of Artificial Sequence: Synthetic oligonucleotide
tttcctactaggaccataggca

SEQ ID NO: 802 - DNA, 22 bp, Artificial Sequence
  Description of Artificial Sequence: Synthetic oligonucleotide
tgaatgactcaaagtagggctc

SEQ ID NO: 803 - DNA, 22 bp, Artificial Sequence
  Description of Artificial Sequence: Synthetic oligonucleotide
atggtcctgaaatgagactggt

SEQ ID NO: 804 - DNA, 22 bp, Artificial Sequence
  Description of Artificial Sequence: Synthetic oligonucleotide
tttgcatttcaggcaatgaccc

SEQ ID NO: 805 - DNA, 22 bp, Artificial Sequence
  Description of Artificial Sequence: Synthetic oligonucleotide
atacatggtgagacaagctctg

SEQ ID NO: 806 - DNA, 22 bp, Artificial Sequence
  Description of Artificial Sequence: Synthetic oligonucleotide
tttgcatttgactgacatggca

SEQ ID NO: 807 - DNA, 22 bp, Artificial Sequence
  Description of Artificial Sequence: Synthetic oligonucleotide
ttactcacagatattcacagca

SEQ ID NO: 808 - DNA, 22 bp, Artificial Sequence
  Description of Artificial Sequence: Synthetic oligonucleotide
ttatacagccactcagaggtcc

SEQ ID NO: 809 - DNA, 22 bp, Artificial Sequence
  Description of Artificial Sequence: Synthetic oligonucleotide
atgataccagcagttctcgggc

SEQ ID NO: 810 - DNA, 22 bp, Artificial Sequence
  Description of Artificial Sequence: Synthetic oligonucleotide
tttccctttaacgcactttccg

SEQ ID NO: 811 - DNA, 22 bp, Artificial Sequence
  Description of Artificial Sequence: Synthetic oligonucleotide
ttaggagtacacttgggagggc

SEQ ID NO: 812 - DNA, 22 bp, Artificial Sequence
  Description of Artificial Sequence: Synthetic oligonucleotide
ttgagaaataagctcccatgct

SEQ ID NO: 813 - DNA, 22 bp, Artificial Sequence
  Description of Artificial Sequence: Synthetic oligonucleotide
attgctcatcacatacttacct

SEQ ID NO: 814 - DNA, 22 bp, Artificial Sequence
  Description of Artificial Sequence: Synthetic oligonucleotide
aatttaaagcgtacatctgcct

SEQ ID NO: 815 - DNA, 22 bp, Artificial Sequence
  Description of Artificial Sequence: Synthetic oligonucleotide
tatattagcccatggccctgcc

SEQ ID NO: 816 - DNA, 22 bp, Artificial Sequence
  Description of Artificial Sequence: Synthetic oligonucleotide
ttctcttgcctctctttctcct

SEQ ID NO: 817 - DNA, 22 bp, Artificial Sequence
  Description of Artificial Sequence: Synthetic oligonucleotide
attcttatgcacctggactcgc

SEQ ID NO: 818 - DNA, 22 bp, Artificial Sequence
  Description of Artificial Sequence: Synthetic oligonucleotide
ttgatacacctctcgaatagct

SEQ ID NO: 819 - DNA, 22 bp, Artificial Sequence
  Description of Artificial Sequence: Synthetic oligonucleotide
tattcgggatatatagattgga

SEQ ID NO: 820 - DNA, 22 bp, Artificial Sequence
  Description of Artificial Sequence: Synthetic oligonucleotide
taaacagaagagatttgctcca

SEQ ID NO: 821 - DNA, 22 bp, Artificial Sequence
  Description of Artificial Sequence: Synthetic oligonucleotide
ttattgagtgacatggagaggt

SEQ ID NO: 822 - DNA, 22 bp, Artificial Sequence
  Description of Artificial Sequence: Synthetic oligonucleotide
taaagttatgaaaccctcagct

SEQ ID NO: 823 - DNA, 22 bp, Artificial Sequence
  Description of Artificial Sequence: Synthetic oligonucleotide
ttatgtgatggaattatacccg

SEQ ID NO: 824 - DNA, 22 bp, Artificial Sequence
  Description of Artificial Sequence: Synthetic oligonucleotide
atatagacagagatggcatgct

SEQ ID NO: 825 - DNA, 22 bp, Artificial Sequence
  Description of Artificial Sequence: Synthetic oligonucleotide
tttctgtttcatctgctctggg

SEQ ID NO: 826 - DNA, 22 bp, Artificial Sequence
  Description of Artificial Sequence: Synthetic oligonucleotide
ttagcatattctgcagctactt

SEQ ID NO: 827 - DNA, 22 bp, Artificial Sequence
  Description of Artificial Sequence: Synthetic oligonucleotide
ctttcttacaacacactggtgg

SEQ ID NO: 828 - DNA, 22 bp, Artificial Sequence
  Description of Artificial Sequence: Synthetic oligonucleotide
aattgtgatcaaagctgtacca

SEQ ID NO: 829 - DNA, 22 bp, Artificial Sequence
  Description of Artificial Sequence: Synthetic oligonucleotide
ttgtatttgcaattagctgcct

SEQ ID NO: 830 - DNA, 22 bp, Artificial Sequence
  Description of Artificial Sequence: Synthetic oligonucleotide
ttgccatggataagtaattggt

SEQ ID NO: 831 - DNA, 22 bp, Artificial Sequence
  Description of Artificial Sequence: Synthetic oligonucleotide
ttcatctgtagggtgtaacggg

SEQ ID NO: 832 - DNA, 22 bp, Artificial Sequence
  Description of Artificial Sequence: Synthetic oligonucleotide
ttatcaagggtctatatttcca

SEQ ID NO: 833 - DNA, 22 bp, Artificial Sequence
  Description of Artificial Sequence: Synthetic oligonucleotide
ttctttaataggaacatctggt

SEQ ID NO: 834 - DNA, 22 bp, Artificial Sequence
  Description of Artificial Sequence: Synthetic oligonucleotide
attcagtggccggagcagtggg

SEQ ID NO: 835 - DNA, 22 bp, Artificial Sequence
  Description of Artificial Sequence: Synthetic oligonucleotide
attgtaattaggagccagtcga

SEQ ID NO: 836 - DNA, 22 bp, Artificial Sequence
  Description of Artificial Sequence: Synthetic oligonucleotide
atctgtcatcaccttaacactc

SEQ ID NO: 837 - DNA, 22 bp, Artificial Sequence
  Description of Artificial Sequence: Synthetic oligonucleotide
ttctccactaagatggtttggg

SEQ ID NO: 838 - DNA, 22 bp, Artificial Sequence
  Description of Artificial Sequence: Synthetic oligonucleotide
atgcagcatgacaaatccaggc

SEQ ID NO: 839 - DNA, 22 bp, Artificial Sequence
  Description of Artificial Sequence: Synthetic oligonucleotide
atagatggtttctgagcatcga

SEQ ID NO: 840 - DNA, 22 bp, Artificial Sequence
  Description of Artificial Sequence: Synthetic oligonucleotide
ttgaactcaaataaagcagggc

SEQ ID NO: 841 - DNA, 22 bp, Artificial Sequence
  Description of Artificial Sequence: Synthetic oligonucleotide
tttaaggcatggtttcagagga

SEQ ID NO: 842 - DNA, 22 bp, Artificial Sequence
  Description of Artificial Sequence: Synthetic oligonucleotide
gaacatagtgacagtcagtgca

SEQ ID NO: 843 - DNA, 22 bp, Artificial Sequence
  Description of Artificial Sequence: Synthetic oligonucleotide
ttaggagacgagtttgtgggtc

SEQ ID NO: 844 - DNA, 22 bp, Artificial Sequence
  Description of Artificial Sequence: Synthetic oligonucleotide
attcctgctatagatcggtcct

SEQ ID NO: 845 - DNA, 22 bp, Artificial Sequence
  Description of Artificial Sequence: Synthetic oligonucleotide
atgcatcactatcgtcaagggc

SEQ ID NO: 846 - DNA, 22 bp, Artificial Sequence
  Description of Artificial Sequence: Synthetic oligonucleotide
ataatggtctacctagtttgct

SEQ ID NO: 847 - DNA, 22 bp, Artificial Sequence
  Description of Artificial Sequence: Synthetic oligonucleotide
taagactgctcatgtgtcaggc

SEQ ID NO: 848 - DNA, 22 bp, Artificial Sequence
  Description of Artificial Sequence: Synthetic oligonucleotide
tacgcaaacgacataaatgccc

SEQ ID NO: 849 - DNA, 22 bp, Artificial Sequence
  Description of Artificial Sequence: Synthetic oligonucleotide
atgccatctaggaatattccga

SEQ ID NO: 850 - DNA, 22 bp, Artificial Sequence
  Description of Artificial Sequence: Synthetic oligonucleotide
ctgatctctgataatatggcgt

SEQ ID NO: 851 - DNA, 22 bp, Artificial Sequence
  Description of Artificial Sequence: Synthetic oligonucleotide
attctgatgaattggctgggct

SEQ ID NO: 852 - DNA, 22 bp, Artificial Sequence
  Description of Artificial Sequence: Synthetic oligonucleotide
tatctagatgcctctgcctgct

SEQ ID NO: 853 - DNA, 22 bp, Artificial Sequence
  Description of Artificial Sequence: Synthetic oligonucleotide
ttctagcaagagaagccatctt

SEQ ID NO: 854 - DNA, 22 bp, Artificial Sequence
  Description of Artificial Sequence: Synthetic oligonucleotide
ttatggcacatttcgttcagct

SEQ ID NO: 855 - DNA, 22 bp, Artificial Sequence
  Description of Artificial Sequence: Synthetic oligonucleotide
tttctctttcagattggttcct

SEQ ID NO: 856 - DNA, 22 bp, Artificial Sequence
  Description of Artificial Sequence: Synthetic oligonucleotide
tttctctttctcttcacatcca

SEQ ID NO: 857 - DNA, 22 bp, Artificial Sequence
  Description of Artificial Sequence: Synthetic oligonucleotide
tacaaatagcacaggaggaccc

SEQ ID NO: 858 - DNA, 22 bp, Artificial Sequence
  Description of Artificial Sequence: Synthetic oligonucleotide
aacgaaagtccatgaatgtcca

SEQ ID NO: 859 - DNA, 22 bp, Artificial Sequence
  Description of Artificial Sequence: Synthetic oligonucleotide
ttaccctgtcattctgtctccc

SEQ ID NO: 860 - DNA, 22 bp, Artificial Sequence
  Description of Artificial Sequence: Synthetic oligonucleotide
atgctgtaatagttgctgagct

SEQ ID NO: 861 - DNA, 22 bp, Artificial Sequence
  Description of Artificial Sequence: Synthetic oligonucleotide
atgatcctctccatgcagacca

SEQ ID NO: 862 - DNA, 22 bp, Artificial Sequence
  Description of Artificial Sequence: Synthetic oligonucleotide
ataagttgtgggttcatctggg

SEQ ID NO: 863 - DNA, 22 bp, Artificial Sequence
  Description of Artificial Sequence: Synthetic oligonucleotide
atcagctctccagagaacaggc

SEQ ID NO: 864 - DNA, 22 bp, Artificial Sequence
  Description of Artificial Sequence: Synthetic oligonucleotide
tttaatcgcgagacaatacggg

SEQ ID NO: 865 - DNA, 22 bp, Artificial Sequence
  Description of Artificial Sequence: Synthetic oligonucleotide
ttatgcaatccttcgtgtacct

SEQ ID NO: 866 - DNA, 22 bp, Artificial Sequence
  Description of Artificial Sequence: Synthetic oligonucleotide
ttaaggcaacaaatagtgtcgt

SEQ ID NO: 867 - DNA, 22 bp, Artificial Sequence
  Description of Artificial Sequence: Synthetic oligonucleotide
atttgagacaatgtcatgccct

SEQ ID NO: 868 - DNA, 22 bp, Artificial Sequence
  Description of Artificial Sequence: Synthetic oligonucleotide
aagagattgagcaatcaaagcg

SEQ ID NO: 869 - DNA, 22 bp, Artificial Sequence
  Description of Artificial Sequence: Synthetic oligonucleotide
ttcaggtctatattcaatggct

SEQ ID NO: 870 - DNA, 22 bp, Artificial Sequence
  Description of Artificial Sequence: Synthetic oligonucleotide
ctgcagtggtaggttctctggg

SEQ ID NO: 871 - DNA, 22 bp, Artificial Sequence
  Description of Artificial Sequence: Synthetic oligonucleotide
aatgggaaggaggaaacagcgt

SEQ ID NO: 872 - DNA, 22 bp, Artificial Sequence
  Description of Artificial Sequence: Synthetic oligonucleotide
atggtgaatgatcttagcggtg

SEQ ID NO: 873 - DNA, 22 bp, Artificial Sequence
  Description of Artificial Sequence: Synthetic oligonucleotide
taggctttgatgctcatgcggc

SEQ ID NO: 874 - DNA, 22 bp, Artificial Sequence
  Description of Artificial Sequence: Synthetic oligonucleotide
tattactctcatatcctcagca

SEQ ID NO: 875 - DNA, 22 bp, Artificial Sequence
  Description of Artificial Sequence: Synthetic oligonucleotide
ttagaacaggtcaccagttcca

SEQ ID NO: 876 - DNA, 22 bp, Artificial Sequence
  Description of Artificial Sequence: Synthetic oligonucleotide
ttagtatgagcctggtgtccct

SEQ ID NO: 877 - DNA, 22 bp, Artificial Sequence
  Description of Artificial Sequence: Synthetic oligonucleotide
tactctcttggtatcaggccca

SEQ ID NO: 878 - DNA, 22 bp, Artificial Sequence
  Description of Artificial Sequence: Synthetic oligonucleotide
attgcaaatggaagcacgtggt

SEQ ID NO: 879 - DNA, 22 bp, Artificial Sequence
  Description of Artificial Sequence: Synthetic oligonucleotide
atagcagtactcagcctacgtt

SEQ ID NO: 880 - DNA, 22 bp, Artificial Sequence
  Description of Artificial Sequence: Synthetic oligonucleotide
ttcttgataaatttgagggcct

SEQ ID NO: 881 - DNA, 22 bp, Artificial Sequence
  Description of Artificial Sequence: Synthetic oligonucleotide
tttggcaagtctttgcatggcc

SEQ ID NO: 882 - DNA, 22 bp, Artificial Sequence
  Description of Artificial Sequence: Synthetic oligonucleotide
tttgcagggcacctactcagga

SEQ ID NO: 883 - DNA, 22 bp, Artificial Sequence
  Description of Artificial Sequence: Synthetic oligonucleotide
atgctgcttaagagcctatgca

SEQ ID NO: 884 - DNA, 22 bp, Artificial Sequence
  Description of Artificial Sequence: Synthetic oligonucleotide
ttaccacaacaatatgtaccca

SEQ ID NO: 885 - DNA, 22 bp, Artificial Sequence
  Description of Artificial Sequence: Synthetic oligonucleotide
tttcttgggctccttagaagct

SEQ ID NO: 886 - DNA, 22 bp, Artificial Sequence
  Description of Artificial Sequence: Synthetic oligonucleotide
atcaaggttatctgtctcagcc

SEQ ID NO: 887 - DNA, 22 bp, Artificial Sequence
  Description of Artificial Sequence: Synthetic oligonucleotide
taagtggtaatgcttcatacca

SEQ ID NO: 888 - DNA, 22 bp, Artificial Sequence
  Description of Artificial Sequence: Synthetic oligonucleotide
tttcctgaggatgctgtgggcc

SEQ ID NO: 889 - DNA, 22 bp, Artificial Sequence
  Description of Artificial Sequence: Synthetic oligonucleotide
tttgacaatgtcactctgtggt

SEQ ID NO: 890 - DNA, 22 bp, Artificial Sequence
  Description of Artificial Sequence: Synthetic oligonucleotide
ttctggtaagtggaggtgccaa

SEQ ID NO: 891 - DNA, 22 bp, Artificial Sequence
  Description of Artificial Sequence: Synthetic oligonucleotide
tacattaagcagagtaattcca

SEQ ID NO: 892 - DNA, 22 bp, Artificial Sequence
  Description of Artificial Sequence: Synthetic oligonucleotide
ttgcttcaagtgtttgatggct

SEQ ID NO: 893 - DNA, 22 bp, Artificial Sequence
  Description of Artificial Sequence: Synthetic oligonucleotide
atcagcaaacacaggtgcagtg

SEQ ID NO: 894 - DNA, 22 bp, Artificial Sequence
  Description of Artificial Sequence: Synthetic oligonucleotide
gtaatcttcctgaatggtgcct

SEQ ID NO: 895 - DNA, 22 bp, Artificial Sequence
  Description of Artificial Sequence: Synthetic oligonucleotide
atacgatgtacagcaaagcgac

SEQ ID NO: 896 - DNA, 22 bp, Artificial Sequence
  Description of Artificial Sequence: Synthetic oligonucleotide
tttccttctcagaccgtttctc

SEQ ID NO: 897 - DNA, 22 bp, Artificial Sequence
  Description of Artificial Sequence: Synthetic oligonucleotide
aacttcttgcagttgttgcggc

SEQ ID NO: 898 - DNA, 22 bp, Artificial Sequence
  Description of Artificial Sequence: Synthetic oligonucleotide
ttgtatctatgtttgaagtgcc

SEQ ID NO: 899 - DNA, 22 bp, Artificial Sequence
  Description of Artificial Sequence: Synthetic oligonucleotide
ttatctggtgagaatctatggt

SEQ ID NO: 900 - DNA, 22 bp, Artificial Sequence
  Description of Artificial Sequence: Synthetic oligonucleotide
attggaaagtactttagctcga

SEQ ID NO: 901 - DNA, 22 bp, Artificial Sequence
  Description of Artificial Sequence: Synthetic oligonucleotide
ttcattgcagacatgtatggct

SEQ ID NO: 902 - DNA, 22 bp, Artificial Sequence
  Description of Artificial Sequence: Synthetic oligonucleotide
tttatctggcaattccaaggct

SEQ ID NO: 903 - DNA, 22 bp, Artificial Sequence
  Description of Artificial Sequence: Synthetic oligonucleotide
ttatcacatcaaggtgcgcgcc

SEQ ID NO: 904 - DNA, 22 bp, Artificial Sequence
  Description of Artificial Sequence: Synthetic oligonucleotide
tttacacaggatatgggctgtt

SEQ ID NO: 905 - DNA, 22 bp, Artificial Sequence
  Description of Artificial Sequence: Synthetic oligonucleotide
tacttctcacagtccacctgga

SEQ ID NO: 906 - DNA, 22 bp, Artificial Sequence
  Description of Artificial Sequence: Synthetic oligonucleotide
ttggcataagacttaatgacct

SEQ ID NO: 907 - DNA, 22 bp, Artificial Sequence
  Description of Artificial Sequence: Synthetic oligonucleotide
ttctgcaaggttcttgacctct

SEQ ID NO: 908 - DNA, 22 bp, Artificial Sequence
  Description of Artificial Sequence: Synthetic oligonucleotide
taaggaaatattctgatgccca

SEQ ID NO: 909 - DNA, 22 bp, Artificial Sequence
  Description of Artificial Sequence: Synthetic oligonucleotide
taggacatgtccagcagctggt

SEQ ID NO: 910 - DNA, 22 bp, Artificial Sequence
  Description of Artificial Sequence: Synthetic oligonucleotide
tagcagatcacctcgaagcggc

SEQ ID NO: 911 - DNA, 22 bp, Artificial Sequence
  Description of Artificial Sequence: Synthetic oligonucleotide
atcaactttcgtggaatctggg

SEQ ID NO: 912 - DNA, 22 bp, Artificial Sequence
  Description of Artificial Sequence: Synthetic oligonucleotide
tacacttccaacttgaactggt

SEQ ID NO: 913 - DNA, 22 bp, Artificial Sequence
  Description of Artificial Sequence: Synthetic oligonucleotide
tttaataccaggccattgccct

SEQ ID NO: 914 - DNA, 22 bp, Artificial Sequence
  Description of Artificial Sequence: Synthetic oligonucleotide
atctggaggtggaatgatggcc

SEQ ID NO: 915 - DNA, 22 bp, Artificial Sequence
  Description of Artificial Sequence: Synthetic oligonucleotide
ttaataactgtgagaacatggg

SEQ ID NO: 916 - DNA, 22 bp, Artificial Sequence
  Description of Artificial Sequence: Synthetic oligonucleotide
ttcagaaatgtccctgattgct

SEQ ID NO: 917 - DNA, 22 bp, Artificial Sequence
  Description of Artificial Sequence: Synthetic oligonucleotide
attgtagtgctcttcctggccc

SEQ ID NO: 918 - DNA, 22 bp, Artificial Sequence
  Description of Artificial Sequence: Synthetic oligonucleotide
tatatgcatacccttgatggcc

SEQ ID NO: 919 - DNA, 22 bp, Artificial Sequence
  Description of Artificial Sequence: Synthetic oligonucleotide
taaggtgaatacaaagattgga

SEQ ID NO: 920 - DNA, 22 bp, Artificial Sequence
  Description of Artificial Sequence: Synthetic oligonucleotide
tttgtactagcttcatgttggt

SEQ ID NO: 921 - DNA, 22 bp, Artificial Sequence
  Description of Artificial Sequence: Synthetic oligonucleotide
atagtagtacacggagatgcgg

SEQ ID NO: 922 - DNA, 22 bp, Artificial Sequence
  Description of Artificial Sequence: Synthetic oligonucleotide
tttgataaagtgtctgtgtcct

SEQ ID NO: 923 - DNA, 22 bp, Artificial Sequence
  Description of Artificial Sequence: Synthetic oligonucleotide
tattgcctgagagatgatggcc

SEQ ID NO: 924 - DNA, 22 bp, Artificial Sequence
  Description of Artificial Sequence: Synthetic oligonucleotide
ttagggaaccatatgggagccc

SEQ ID NO: 925 - DNA, 22 bp, Artificial Sequence
  Description of Artificial Sequence: Synthetic oligonucleotide
taatgctaccatggtgttggct

SEQ ID NO: 926 - DNA, 22 bp, Artificial Sequence
  Description of Artificial Sequence: Synthetic oligonucleotide
ttattagtgggagttctgagtc

SEQ ID NO: 927 - DNA, 22 bp, Artificial Sequence
  Description of Artificial Sequence: Synthetic oligonucleotide
atagaatcctcctcaagagggc

SEQ ID NO: 928 - DNA, 22 bp, Artificial Sequence
  Description of Artificial Sequence: Synthetic oligonucleotide
tagcaagtagatggacaggcct

SEQ ID NO: 929 - DNA, 22 bp, Artificial Sequence
  Description of Artificial Sequence: Synthetic oligonucleotide
atatcccacactactttctggt

SEQ ID NO: 930 - DNA, 22 bp, Artificial Sequence
  Description of Artificial Sequence: Synthetic oligonucleotide
tagttgctacaaggaccatggt

SEQ ID NO: 931 - DNA, 22 bp, Artificial Sequence
  Description of Artificial Sequence: Synthetic oligonucleotide
attctgtaagtctttgctacca

SEQ ID NO: 932 - DNA, 22 bp, Artificial Sequence
  Description of Artificial Sequence: Synthetic oligonucleotide
cttcaccttggctttatctcct

SEQ ID NO: 933 - DNA, 22 bp, Artificial Sequence
  Description of Artificial Sequence: Synthetic oligonucleotide
ctcatatgcaacatttagggcc

SEQ ID NO: 934 - DNA, 22 bp, Artificial Sequence
  Description of Artificial Sequence: Synthetic oligonucleotide
attaataagtgctgtcagacca

SEQ ID NO: 935 - DNA, 22 bp, Artificial Sequence
  Description of Artificial Sequence: Synthetic oligonucleotide
atgcatacagtgagccgcagcc

SEQ ID NO: 936 - DNA, 22 bp, Artificial Sequence
  Description of Artificial Sequence: Synthetic oligonucleotide
tatatccacactggaaagtgca

SEQ ID NO: 937 - DNA, 22 bp, Artificial Sequence
  Description of Artificial Sequence: Synthetic oligonucleotide
ttgaggtacctgagcaggtgct

SEQ ID NO: 938 - DNA, 22 bp, Artificial Sequence
  Description of Artificial Sequence: Synthetic oligonucleotide
ttgatcatctccaggagccgcc

SEQ ID NO: 939 - DNA, 22 bp, Artificial Sequence
  Description of Artificial Sequence: Synthetic oligonucleotide
tttaatcctcgaaagagttcct

SEQ ID NO: 940 - DNA, 22 bp, Artificial Sequence
  Description of Artificial Sequence: Synthetic oligonucleotide
ttgtgtatgtggacgatgtcca

SEQ ID NO: 941 - DNA, 22 bp, Artificial Sequence
  Description of Artificial Sequence: Synthetic oligonucleotide
atctcctcatatctcttctggc

SEQ ID NO: 942 - DNA, 22 bp, Artificial Sequence
  Description of Artificial Sequence: Synthetic oligonucleotide
gtagtggaggagattactttgc

SEQ ID NO: 943 - DNA, 22 bp, Artificial Sequence
  Description of Artificial Sequence: Synthetic oligonucleotide
catcagcttgaacttgtggtcc

SEQ ID NO: 944 - DNA, 22 bp, Artificial Sequence
  Description of Artificial Sequence: Synthetic oligonucleotide
atcttggacaagtttagctcca

SEQ ID NO: 945 - DNA, 22 bp, Artificial Sequence
  Description of Artificial Sequence: Synthetic oligonucleotide
tagggtggacaatactgaggcc

SEQ ID NO: 946 - DNA, 22 bp, Artificial Sequence
  Description of Artificial Sequence: Synthetic oligonucleotide
tttcgggagctgcttcagtgcc

SEQ ID NO: 947 - DNA, 22 bp, Artificial Sequence
  Description of Artificial Sequence: Synthetic oligonucleotide
aactcagctccttacaagggct

SEQ ID NO: 948 - DNA, 22 bp, Artificial Sequence
  Description of Artificial Sequence: Synthetic oligonucleotide
tttcttcactcctctgtacgcc

SEQ ID NO: 949 - DNA, 22 bp, Artificial Sequence
  Description of Artificial Sequence: Synthetic oligonucleotide
aatttcttggacatggtttcct

SEQ ID NO: 950 - DNA, 22 bp, Artificial Sequence
  Description of Artificial Sequence: Synthetic oligonucleotide
tatcaatatcttcttcatggct

SEQ ID NO: 951 - DNA, 22 bp, Artificial Sequence
  Description of Artificial Sequence: Synthetic oligonucleotide
ataggagaaccctttcctagcc

SEQ ID NO: 952 - DNA, 22 bp, Artificial Sequence
  Description of Artificial Sequence: Synthetic oligonucleotide
tttccacgcgatttggctggcg

SEQ ID NO: 953 - DNA, 22 bp, Artificial Sequence
  Description of Artificial Sequence: Synthetic oligonucleotide
atcgactgtagggagatgggcc

SEQ ID NO: 954 - DNA, 22 bp, Artificial Sequence
  Description of Artificial Sequence: Synthetic oligonucleotide
aattaacaggttcagatcggca

SEQ ID NO: 955 - DNA, 22 bp, Artificial Sequence
  Description of Artificial Sequence: Synthetic oligonucleotide
aattctacccaatctctagcca

SEQ ID NO: 956 - DNA, 22 bp, Artificial Sequence
  Description of Artificial Sequence: Synthetic oligonucleotide
gtagagctgtaatgagtttggc

SEQ ID NO: 957 - DNA, 22 bp, Artificial Sequence
  Description of Artificial Sequence: Synthetic oligonucleotide
aattattgtggaactgtgagtg

SEQ ID NO: 958 - DNA, 22 bp, Artificial Sequence
  Description of Artificial Sequence: Synthetic oligonucleotide
ttcatggtggacattctaaggt

SEQ ID NO: 959 - DNA, 22 bp, Artificial Sequence
  Description of Artificial Sequence: Synthetic oligonucleotide
ataacaatgctctttggtgccc

SEQ ID NO: 960 - DNA, 22 bp, Artificial Sequence
  Description of Artificial Sequence: Synthetic oligonucleotide
ttaatcttgaaccttggaggct

SEQ ID NO: 961 - DNA, 22 bp, Artificial Sequence
  Description of Artificial Sequence: Synthetic oligonucleotide
ttattgaagaaaccaatcctgg

SEQ ID NO: 962 - DNA, 22 bp, Artificial Sequence
  Description of Artificial Sequence: Synthetic oligonucleotide
ttctggattcatgtcaggcccg

SEQ ID NO: 963 - DNA, 22 bp, Artificial Sequence
  Description of Artificial Sequence: Synthetic oligonucleotide
ttgagttcagtcattgctgcct

SEQ ID NO: 964 - DNA, 22 bp, Artificial Sequence
  Description of Artificial Sequence: Synthetic oligonucleotide
gttctctgagattgagtgaggg

SEQ ID NO: 965 - DNA, 22 bp, Artificial Sequence
  Description of Artificial Sequence: Synthetic oligonucleotide
tttacagcatttccaatcggcc

SEQ ID NO: 966 - DNA, 22 bp, Artificial Sequence
  Description of Artificial Sequence: Synthetic oligonucleotide
aatatgatgctcatgatgccca

SEQ ID NO: 967 - DNA, 22 bp, Artificial Sequence
  Description of Artificial Sequence: Synthetic oligonucleotide
ttctgatctcagttgagcactc

SEQ ID NO: 968 - DNA, 22 bp, Artificial Sequence
  Description of Artificial Sequence: Synthetic oligonucleotide
aatttcacaaagcgagtgaggt

SEQ ID NO: 969 - DNA, 22 bp, Artificial Sequence
  Description of Artificial Sequence: Synthetic oligonucleotide
ttcctcagaaacttcgattcgc

SEQ ID NO: 970 - DNA, 22 bp, Artificial Sequence
  Description of Artificial Sequence: Synthetic oligonucleotide
atctttccacatgtcctctgtc

SEQ ID NO: 971 - DNA, 22 bp, Artificial Sequence
  Description of Artificial Sequence: Synthetic oligonucleotide
ataatccaggagtatataacca

SEQ ID NO: 972 - DNA, 22 bp, Artificial Sequence
  Description of Artificial Sequence: Synthetic oligonucleotide
aacgacatagaagttgtctcct

SEQ ID NO: 973 - DNA, 22 bp, Artificial Sequence
  Description of Artificial Sequence: Synthetic oligonucleotide
ttgtggtctcagagcctgcggt

SEQ ID NO: 974 - DNA, 22 bp, Artificial Sequence
  Description of Artificial Sequence: Synthetic oligonucleotide
taaggactccgaagaaactggt

SEQ ID NO: 975 - DNA, 22 bp, Artificial Sequence
  Description of Artificial Sequence: Synthetic oligonucleotide
tagatttgaggttagatgggct

SEQ ID NO: 976 - DNA, 22 bp, Artificial Sequence
  Description of Artificial Sequence: Synthetic oligonucleotide
tttattgcaggttccaaccggg

SEQ ID NO: 977 - DNA, 22 bp, Artificial Sequence
  Description of Artificial Sequence: Synthetic oligonucleotide
tttgctcctgccgctgaggctt

SEQ ID NO: 978 - DNA, 22 bp, Artificial Sequence
  Description of Artificial Sequence: Synthetic oligonucleotide
tattaaacaatccttccgtgga

SEQ ID NO: 979 - DNA, 22 bp, Artificial Sequence
  Description of Artificial Sequence: Synthetic oligonucleotide
attgtttagcacgcagactgcc

SEQ ID NO: 980 - DNA, 22 bp, Artificial Sequence
  Description of Artificial Sequence: Synthetic oligonucleotide
ataatgagtaacttcagaaggc

SEQ ID NO: 981 - DNA, 22 bp, Artificial Sequence
  Description of Artificial Sequence: Synthetic oligonucleotide
ttgcataataattcaggagcct

SEQ ID NO: 982 - DNA, 22 bp, Artificial Sequence
  Description of Artificial Sequence: Synthetic oligonucleotide
atgtatagtcacatgaatgcct

SEQ ID NO: 983 - DNA, 22 bp, Artificial Sequence
  Description of Artificial Sequence: Synthetic oligonucleotide
attagggtgtagaattgatggt

SEQ ID NO: 984 - DNA, 22 bp, Artificial Sequence
  Description of Artificial Sequence: Synthetic oligonucleotide
taactacataaacagcagaggt

SEQ ID NO: 985 - DNA, 22 bp, Artificial Sequence
  Description of Artificial Sequence: Synthetic oligonucleotide
ttgcctgtgcactggatctcgt

SEQ ID NO: 986 - DNA, 22 bp, Artificial Sequence
  Description of Artificial Sequence: Synthetic oligonucleotide
tagttgttccagacgtacagct

SEQ ID NO: 987 - DNA, 22 bp, Artificial Sequence
  Description of Artificial Sequence: Synthetic oligonucleotide
ttatttgaggagctcatgagct

SEQ ID NO: 988 - DNA, 22 bp, Artificial Sequence
  Description of Artificial Sequence: Synthetic oligonucleotide
ttatacaaagagttggtcccga

SEQ ID NO: 989 - DNA, 22 bp, Artificial Sequence
  Description of Artificial Sequence: Synthetic oligonucleotide
tgatactttcaatttcagtggg

SEQ ID NO: 990 - DNA, 22 bp, Artificial Sequence
  Description of Artificial Sequence: Synthetic oligonucleotide
ataacaaagctcatcctagcca

SEQ ID NO: 991 - DNA, 22 bp, Artificial Sequence
  Description of Artificial Sequence: Synthetic oligonucleotide
attcttcttaaagtgggagggc

SEQ ID NO: 992 - DNA, 22 bp, Artificial Sequence
  Description of Artificial Sequence: Synthetic oligonucleotide
cataaattcgctcatctaggct

SEQ ID NO: 993 - DNA, 22 bp, Artificial Sequence
  Description of Artificial Sequence: Synthetic oligonucleotide
tttccttatcactcttcatcac

SEQ ID NO: 994 - DNA, 22 bp, Artificial Sequence
  Description of Artificial Sequence: Synthetic oligonucleotide
ttcatacagcttctgcacggcc

SEQ ID NO: 995 - DNA, 22 bp, Artificial Sequence
  Description of Artificial Sequence: Synthetic oligonucleotide
ttagacgtataaagccttggct

SEQ ID NO: 996 - DNA, 22 bp, Artificial Sequence
  Description of Artificial Sequence: Synthetic oligonucleotide
atcagttccagcagaatgaggc

SEQ ID NO: 997 - DNA, 22 bp, Artificial Sequence
  Description of Artificial Sequence: Synthetic oligonucleotide
aatgggagctagggagagacga

SEQ ID NO: 998 - DNA, 22 bp, Artificial Sequence
  Description of Artificial Sequence: Synthetic oligonucleotide
taattgaaattgggtattgcat

SEQ ID NO: 999 - DNA, 22 bp, Artificial Sequence
  Description of Artificial Sequence: Synthetic oligonucleotide
ttaatcctccgtacagtcacgt

SEQ ID NO: 1000 - DNA, 22 bp, Artificial Sequence
  Description of Artificial Sequence: Synthetic oligonucleotide
tttctatttctgatggcgtgct

SEQ ID NO: 1001 - DNA, 22 bp, Artificial Sequence
  Description of Artificial Sequence: Synthetic oligonucleotide
ttagttccatttctttgttcct

SEQ ID NO: 1002 - DNA, 22 bp, Artificial Sequence
  Description of Artificial Sequence: Synthetic oligonucleotide
atatttgagataactacaacca

SEQ ID NO: 1003 - DNA, 22 bp, Artificial Sequence
  Description of Artificial Sequence: Synthetic oligonucleotide
tttcaattcgtattgtggccca

SEQ ID NO: 1004 - DNA, 22 bp, Artificial Sequence
  Description of Artificial Sequence: Synthetic oligonucleotide
aagaaataggagtggttgtcgg

SEQ ID NO: 1005 - DNA, 22 bp, Artificial Sequence
  Description of Artificial Sequence: Synthetic oligonucleotide
atcaccaagaggagactcagcc

SEQ ID NO: 1006 - DNA, 22 bp, Artificial Sequence
  Description of Artificial Sequence: Synthetic oligonucleotide
ttattctcttcagttcctccat

SEQ ID NO: 1007 - DNA, 22 bp, Artificial Sequence
  Description of Artificial Sequence: Synthetic oligonucleotide
attagctttctggccatgacca

SEQ ID NO: 1008 - DNA, 22 bp, Artificial Sequence
  Description of Artificial Sequence: Synthetic oligonucleotide
ttctaggctgacaattagtcct

SEQ ID NO: 1009 - DNA, 22 bp, Artificial Sequence
  Description of Artificial Sequence: Synthetic oligonucleotide
atccctgaagagtaactgcggc

SEQ ID NO: 1010 - DNA, 22 bp, Artificial Sequence
  Description of Artificial Sequence: Synthetic oligonucleotide
tttcatggagatacgaaaggcc

SEQ ID NO: 1011 - DNA, 22 bp, Artificial Sequence
  Description of Artificial Sequence: Synthetic oligonucleotide
tatctctccctcaatgtctgga

SEQ ID NO: 1012 - DNA, 22 bp, Artificial Sequence
  Description of Artificial Sequence: Synthetic oligonucleotide
tgaagtactgatgttcagcggg

SEQ ID NO: 1013 - DNA, 22 bp, Artificial Sequence
  Description of Artificial Sequence: Synthetic oligonucleotide
ttcttctagggatttctgtggt

SEQ ID NO: 1014 - DNA, 22 bp, Artificial Sequence
  Description of Artificial Sequence: Synthetic oligonucleotide
tttactaatcagaaaggtcggt

SEQ ID NO: 1015 - DNA, 22 bp, Artificial Sequence
  Description of Artificial Sequence: Synthetic oligonucleotide
ataatggttcatatgactgcca

SEQ ID NO: 1016 - DNA, 22 bp, Artificial Sequence
  Description of Artificial Sequence: Synthetic oligonucleotide
aattcaaacatttctgctggct

SEQ ID NO: 1017 - DNA, 22 bp, Artificial Sequence
  Description of Artificial Sequence: Synthetic oligonucleotide
tttgtgctacagactaaatcca

SEQ ID NO: 1018 - DNA, 22 bp, Artificial Sequence
  Description of Artificial Sequence: Synthetic oligonucleotide
tataaccttcaaagcactggca

SEQ ID NO: 1019 - DNA, 22 bp, Artificial Sequence
  Description of Artificial Sequence: Synthetic oligonucleotide
tttaaccctcgtgtggcaggct

SEQ ID NO: 1020 - DNA, 22 bp, Artificial Sequence
  Description of Artificial Sequence: Synthetic oligonucleotide
cagagtgatgacatgcttggcc

SEQ ID NO: 1021 - DNA, 22 bp, Artificial Sequence
  Description of Artificial Sequence: Synthetic oligonucleotide
attgatttattcagtaaccgga

SEQ ID NO: 1022 - DNA, 22 bp, Artificial Sequence
  Description of Artificial Sequence: Synthetic oligonucleotide
atgaactaccagatgcaggttg

SEQ ID NO: 1023 - DNA, 22 bp, Artificial Sequence
  Description of Artificial Sequence: Synthetic oligonucleotide
gcaatttgagctttagctcggt

SEQ ID NO: 1024 - DNA, 22 bp, Artificial Sequence
  Description of Artificial Sequence: Synthetic oligonucleotide
ttaaccggattggcaatgacgc

SEQ ID NO: 1025 - DNA, 22 bp, Artificial Sequence
  Description of Artificial Sequence: Synthetic oligonucleotide
ataaggtgctaggtgatggcgg

SEQ ID NO: 1026 - DNA, 22 bp, Artificial Sequence
  Description of Artificial Sequence: Synthetic oligonucleotide
tttaaatgggtgctacactggt

SEQ ID NO: 1027 - DNA, 22 bp, Artificial Sequence
  Description of Artificial Sequence: Synthetic oligonucleotide
aattcactggcggtaaagtcct

SEQ ID NO: 1028 - DNA, 22 bp, Artificial Sequence
  Description of Artificial Sequence: Synthetic oligonucleotide
attccaaatctcttcacttgcc

SEQ ID NO: 1029 - DNA, 22 bp, Artificial Sequence
  Description of Artificial Sequence: Synthetic oligonucleotide
aacacatttatggcccacagtg

SEQ ID NO: 1030 - DNA, 22 bp, Artificial Sequence
  Description of Artificial Sequence: Synthetic oligonucleotide
atatcataggagttgtatcgct

SEQ ID NO: 1031 - DNA, 22 bp, Artificial Sequence
  Description of Artificial Sequence: Synthetic oligonucleotide
atttagtgtaatagccattcct

SEQ ID NO: 1032 - DNA, 22 bp, Artificial Sequence
  Description of Artificial Sequence: Synthetic oligonucleotide
tagtaatctccctgaacgctgc

SEQ ID NO: 1033 - DNA, 22 bp, Artificial Sequence
  Description of Artificial Sequence: Synthetic oligonucleotide
aatgttctccagatcaatgcct

SEQ ID NO: 1034 - DNA, 22 bp, Artificial Sequence
  Description of Artificial Sequence: Synthetic oligonucleotide
ttcctgtcattgattatatgct

SEQ ID NO: 1035 - DNA, 22 bp, Artificial Sequence
  Description of Artificial Sequence: Synthetic oligonucleotide
tttcccttaggagttctcagct

SEQ ID NO: 1036 - DNA, 22 bp, Artificial Sequence
  Description of Artificial Sequence: Synthetic oligonucleotide
tttccttaggagtttgtagccg

SEQ ID NO: 1037 - DNA, 22 bp, Artificial Sequence
  Description of Artificial Sequence: Synthetic oligonucleotide
aatgaaattcatggtctctgca

SEQ ID NO: 1038 - DNA, 22 bp, Artificial Sequence
  Description of Artificial Sequence: Synthetic oligonucleotide
atagcaaagggatccatcagga

SEQ ID NO: 1039 - DNA, 22 bp, Artificial Sequence
  Description of Artificial Sequence: Synthetic oligonucleotide
ttgtaacagagaagcgtgccca

SEQ ID NO: 1040 - DNA, 22 bp, Artificial Sequence
  Description of Artificial Sequence: Synthetic oligonucleotide
tattggtttgcgaataagacct

SEQ ID NO: 1041 - DNA, 22 bp, Artificial Sequence
  Description of Artificial Sequence: Synthetic oligonucleotide
tttcttcttgatcttatctcca

SEQ ID NO: 1042 - DNA, 22 bp, Artificial Sequence
  Description of Artificial Sequence: Synthetic oligonucleotide
atactgtagaacatgacatcct

SEQ ID NO: 1043 - DNA, 22 bp, Artificial Sequence
  Description of Artificial Sequence: Synthetic oligonucleotide
tagatcatgcactctgactgct

SEQ ID NO: 1044 - DNA, 22 bp, Artificial Sequence
  Description of Artificial Sequence: Synthetic oligonucleotide
taaattaaccctttccggtcca

SEQ ID NO: 1045 - DNA, 22 bp, Artificial Sequence
  Description of Artificial Sequence: Synthetic oligonucleotide
ttaacattcattggtccttcct

SEQ ID NO: 1046 - DNA, 22 bp, Artificial Sequence
  Description of Artificial Sequence: Synthetic oligonucleotide
tttcggaagaacggaagaagca

SEQ ID NO: 1047 - DNA, 22 bp, Artificial Sequence
  Description of Artificial Sequence: Synthetic oligonucleotide
ttgtattcctggttcttatggc

SEQ ID NO: 1048 - DNA, 22 bp, Artificial Sequence
  Description of Artificial Sequence: Synthetic oligonucleotide
aacttaactgtcctccagtgcg

SEQ ID NO: 1049 - DNA, 22 bp, Artificial Sequence
  Description of Artificial Sequence: Synthetic oligonucleotide
attcatcacaagcaggtttccc

SEQ ID NO: 1050 - DNA, 22 bp, Artificial Sequence
  Description of Artificial Sequence: Synthetic oligonucleotide
ttcttccatcatgctcaacggc

SEQ ID NO: 1051 - DNA, 22 bp, Artificial Sequence
  Description of Artificial Sequence: Synthetic oligonucleotide
tttacgtactacatcatcccaa

SEQ ID NO: 1052 - DNA, 22 bp, Artificial Sequence
  Description of Artificial Sequence: Synthetic oligonucleotide
attaataactatagagacacca

SEQ ID NO: 1053 - DNA, 22 bp, Artificial Sequence
  Description of Artificial Sequence: Synthetic oligonucleotide
aatgttcgggagaaacacttca

SEQ ID NO: 1054 - DNA, 22 bp, Artificial Sequence
  Description of Artificial Sequence: Synthetic oligonucleotide
ttgtaggaacggtacgtgggca

SEQ ID NO: 1055 - DNA, 22 bp, Artificial Sequence
  Description of Artificial Sequence: Synthetic oligonucleotide
tttctcgggaaacagatctggg

SEQ ID NO: 1056 - DNA, 22 bp, Artificial Sequence
  Description of Artificial Sequence: Synthetic oligonucleotide
tattctccacactttcagtcca

SEQ ID NO: 1057 - DNA, 22 bp, Artificial Sequence
  Description of Artificial Sequence: Synthetic oligonucleotide
gtgattgctctctttagaggcg

SEQ ID NO: 1058 - DNA, 22 bp, Artificial Sequence
  Description of Artificial Sequence: Synthetic oligonucleotide
tttattaaagagatcattccgc

SEQ ID NO: 1059 - DNA, 22 bp, Artificial Sequence
  Description of Artificial Sequence: Synthetic oligonucleotide
ctagaatttgaattgctgagcc

SEQ ID NO: 1060 - DNA, 22 bp, Artificial Sequence
  Description of Artificial Sequence: Synthetic oligonucleotide
aattgcagaatcgtgagatggt

SEQ ID NO: 1061 - DNA, 22 bp, Artificial Sequence
  Description of Artificial Sequence: Synthetic oligonucleotide
aatggtagaaattggaagtggc

SEQ ID NO: 1062 - DNA, 22 bp, Artificial Sequence
  Description of Artificial Sequence: Synthetic oligonucleotide
atgctttaggacgtccagctgc

SEQ ID NO: 1063 - DNA, 22 bp, Artificial Sequence
  Description of Artificial Sequence: Synthetic oligonucleotide
ttaagagaagcaatgactcgct

SEQ ID NO: 1064 - DNA, 22 bp, Artificial Sequence
  Description of Artificial Sequence: Synthetic oligonucleotide
tttgcaaccaactctaatctcg

SEQ ID NO: 1065 - DNA, 22 bp, Artificial Sequence
  Description of Artificial Sequence: Synthetic oligonucleotide
tatttctctggtttggaaaggt

SEQ ID NO: 1066 - DNA, 22 bp, Artificial Sequence
  Description of Artificial Sequence: Synthetic oligonucleotide
aatttccctgatatgatctggt

SEQ ID NO: 1067 - DNA, 22 bp, Artificial Sequence
  Description of Artificial Sequence: Synthetic oligonucleotide
ttaacaaattggactattggac

SEQ ID NO: 1068 - DNA, 22 bp, Artificial Sequence
  Description of Artificial Sequence: Synthetic oligonucleotide
atatgttaatggagtacttcct

SEQ ID NO: 1069 - DNA, 22 bp, Artificial Sequence
  Description of Artificial Sequence: Synthetic oligonucleotide
atagaaattcattccaattccc

SEQ ID NO: 1070 - DNA, 22 bp, Artificial Sequence
  Description of Artificial Sequence: Synthetic oligonucleotide
atgagggttgatttcaggccca

SEQ ID NO: 1071 - DNA, 22 bp, Artificial Sequence
  Description of Artificial Sequence: Synthetic oligonucleotide
taattcacaaagcctggcagct

SEQ ID NO: 1072 - DNA, 22 bp, Artificial Sequence
  Description of Artificial Sequence: Synthetic oligonucleotide
ttgttgttagcaccaggagccg

SEQ ID NO: 1073 - DNA, 22 bp, Artificial Sequence
  Description of Artificial Sequence: Synthetic oligonucleotide
atgtgggacacctttatgcggc

SEQ ID NO: 1074 - DNA, 22 bp, Artificial Sequence
  Description of Artificial Sequence: Synthetic oligonucleotide
aatggttgtcaaagagtttggt

SEQ ID NO: 1075 - DNA, 22 bp, Artificial Sequence
  Description of Artificial Sequence: Synthetic oligonucleotide
taagctatcctattaattgggc

SEQ ID NO: 1076 - DNA, 22 bp, Artificial Sequence
  Description of Artificial Sequence: Synthetic oligonucleotide
taataccatcacggttctggtc

SEQ ID NO: 1077 - DNA, 22 bp, Artificial Sequence
  Description of Artificial Sequence: Synthetic oligonucleotide
taaagtactcaatgggtgtcca

SEQ ID NO: 1078 - DNA, 22 bp, Artificial Sequence
  Description of Artificial Sequence: Synthetic oligonucleotide
tattggaatgggatcagcacgg

SEQ ID NO: 1079 - DNA, 22 bp, Artificial Sequence
  Description of Artificial Sequence: Synthetic oligonucleotide
ttaaattgtcaaagtacatcgt

SEQ ID NO: 1080 - DNA, 22 bp, Artificial Sequence
  Description of Artificial Sequence: Synthetic oligonucleotide
gtggagtaaagaatggcaaggc

SEQ ID NO: 1081 - DNA, 22 bp, Artificial Sequence
  Description of Artificial Sequence: Synthetic oligonucleotide
atttcaaccgactgatttgcgg

SEQ ID NO: 1082 - DNA, 22 bp, Artificial Sequence
  Description of Artificial Sequence: Synthetic oligonucleotide
gtagaatatcacgcaggcaggg

SEQ ID NO: 1083 - DNA, 22 bp, Artificial Sequence
  Description of Artificial Sequence: Synthetic oligonucleotide
ttatcacagatgatttcagcct

SEQ ID NO: 1084 - DNA, 22 bp, Artificial Sequence
  Description of Artificial Sequence: Synthetic oligonucleotide
ttatactcatagtcctcaacct

SEQ ID NO: 1085 - DNA, 22 bp, Artificial Sequence
  Description of Artificial Sequence: Synthetic oligonucleotide
tttattcattgctttataagcc

SEQ ID NO: 1086 - DNA, 22 bp, Artificial Sequence
  Description of Artificial Sequence: Synthetic oligonucleotide
tttcattcaaattctctaccgc

SEQ ID NO: 1087 - DNA, 22 bp, Artificial Sequence
  Description of Artificial Sequence: Synthetic oligonucleotide
tttaatggtaatcttctttgct

SEQ ID NO: 1088 - DNA, 22 bp, Artificial Sequence
  Description of Artificial Sequence: Synthetic oligonucleotide
ttgtaatatactgctctctcct

SEQ ID NO: 1089 - DNA, 22 bp, Artificial Sequence
  Description of Artificial Sequence: Synthetic oligonucleotide
taagagtatgagggttcgaggc

SEQ ID NO: 1090 - DNA, 22 bp, Artificial Sequence
  Description of Artificial Sequence: Synthetic oligonucleotide
tttaaattagaggctccctgga

SEQ ID NO: 1091 - DNA, 22 bp, Artificial Sequence
  Description of Artificial Sequence: Synthetic oligonucleotide
aataggtagcgattctgacctt

SEQ ID NO: 1092 - DNA, 22 bp, Artificial Sequence
  Description of Artificial Sequence: Synthetic oligonucleotide
attccacaccactgagatccgc

SEQ ID NO: 1093 - DNA, 22 bp, Artificial Sequence
  Description of Artificial Sequence: Synthetic oligonucleotide
attgcttcccacaatttctggc

SEQ ID NO: 1094 - DNA, 22 bp, Artificial Sequence
  Description of Artificial Sequence: Synthetic oligonucleotide
aattagaatcaattgttgacct

SEQ ID NO: 1095 - DNA, 22 bp, Artificial Sequence
  Description of Artificial Sequence: Synthetic oligonucleotide
tttgtcgataagataggatggt

SEQ ID NO: 1096 - DNA, 22 bp, Artificial Sequence
  Description of Artificial Sequence: Synthetic oligonucleotide
tttggtaataggccaccaaggc

SEQ ID NO: 1097 - DNA, 22 bp, Artificial Sequence
  Description of Artificial Sequence: Synthetic oligonucleotide
tttcctagtcataccaattctg

SEQ ID NO: 1098 - DNA, 22 bp, Artificial Sequence
  Description of Artificial Sequence: Synthetic oligonucleotide
ttatcaggtgatggtggcacgg

SEQ ID NO: 1099 - DNA, 22 bp, Artificial Sequence
  Description of Artificial Sequence: Synthetic oligonucleotide
tttaaagttgactcacggtggg

SEQ ID NO: 1100 - DNA, 22 bp, Artificial Sequence
  Description of Artificial Sequence: Synthetic oligonucleotide
aataatgagaatgtatttgcct

SEQ ID NO: 1101 - DNA, 22 bp, Artificial Sequence
  Description of Artificial Sequence: Synthetic oligonucleotide
ttgtctttacttgtaaggtgtt

SEQ ID NO: 1102 - DNA, 22 bp, Artificial Sequence
  Description of Artificial Sequence: Synthetic oligonucleotide
ctaaatgttgacggtcttggcc

SEQ ID NO: 1103 - DNA, 22 bp, Artificial Sequence
  Description of Artificial Sequence: Synthetic oligonucleotide
tacatggactataaatactgca

SEQ ID NO: 1104 - DNA, 22 bp, Artificial Sequence
  Description of Artificial Sequence: Synthetic oligonucleotide
aatttcttcaatatccttagct

SEQ ID NO: 1105 - DNA, 22 bp, Artificial Sequence
  Description of Artificial Sequence: Synthetic oligonucleotide
atagactatcacttggaaagca

SEQ ID NO: 1106 - DNA, 22 bp, Artificial Sequence
  Description of Artificial Sequence: Synthetic oligonucleotide
aatgatcctcattacagaggcc

SEQ ID NO: 1107 - DNA, 22 bp, Artificial Sequence
  Description of Artificial Sequence: Synthetic oligonucleotide
atatgatgcctcattatgagcg

SEQ ID NO: 1108 - DNA, 22 bp, Artificial Sequence
  Description of Artificial Sequence: Synthetic oligonucleotide
atcagataggagctggtctgta

SEQ ID NO: 1109 - DNA, 22 bp, Artificial Sequence
  Description of Artificial Sequence: Synthetic oligonucleotide
aatttctttccatggacctggg

SEQ ID NO: 1110 - DNA, 22 bp, Artificial Sequence
  Description of Artificial Sequence: Synthetic oligonucleotide
tttattctttccaacctttcct

SEQ ID NO: 1111 - DNA, 22 bp, Artificial Sequence
  Description of Artificial Sequence: Synthetic oligonucleotide
tttagcttcattatcttctgct

SEQ ID NO: 1112 - DNA, 22 bp, Artificial Sequence
  Description of Artificial Sequence: Synthetic oligonucleotide
ttaataggtaggagacctccag

SEQ ID NO: 1113 - DNA, 22 bp, Artificial Sequence
  Description of Artificial Sequence: Synthetic oligonucleotide
attgatagtcagtcatggtggt

SEQ ID NO: 1114 - DNA, 22 bp, Artificial Sequence
  Description of Artificial Sequence: Synthetic oligonucleotide
tttcatcttcaacttcactgca

SEQ ID NO: 1115 - DNA, 22 bp, Artificial Sequence
  Description of Artificial Sequence: Synthetic oligonucleotide
attacgtttgaaactgccagcg

SEQ ID NO: 1116 - DNA, 22 bp, Artificial Sequence
  Description of Artificial Sequence: Synthetic oligonucleotide
ttaagtaatgcgatattgagca

SEQ ID NO: 1117 - DNA, 22 bp, Artificial Sequence
  Description of Artificial Sequence: Synthetic oligonucleotide
ttataaaccaccatatgctccc

SEQ ID NO: 1118 - DNA, 22 bp, Artificial Sequence
  Description of Artificial Sequence: Synthetic oligonucleotide
taatggtattgtgcttgctgct

SEQ ID NO: 1119 - DNA, 22 bp, Artificial Sequence
  Description of Artificial Sequence: Synthetic oligonucleotide
ctatcttctcatagctggtggt

SEQ ID NO: 1120 - DNA, 22 bp, Artificial Sequence
  Description of Artificial Sequence: Synthetic oligonucleotide
ttatgttacatagtagaatcca

SEQ ID NO: 1121 - DNA, 22 bp, Artificial Sequence
  Description of Artificial Sequence: Synthetic oligonucleotide
taaatctgatggttcttcagcc

SEQ ID NO: 1122 - DNA, 22 bp, Artificial Sequence
  Description of Artificial Sequence: Synthetic oligonucleotide
tttgttacagatgtgatgtgcc

SEQ ID NO: 1123 - DNA, 22 bp, Artificial Sequence
  Description of Artificial Sequence: Synthetic oligonucleotide
tttcttcatccatttgaatgcc

SEQ ID NO: 1124 - DNA, 22 bp, Artificial Sequence
  Description of Artificial Sequence: Synthetic oligonucleotide
ttagcgatccattcattcacca

SEQ ID NO: 1125 - DNA, 22 bp, Artificial Sequence
  Description of Artificial Sequence: Synthetic oligonucleotide
attaacagtgtcattagctcca

SEQ ID NO: 1126 - DNA, 22 bp, Artificial Sequence
  Description of Artificial Sequence: Synthetic oligonucleotide
taactttaaatcgatcatcggt

SEQ ID NO: 1127 - DNA, 22 bp, Artificial Sequence
  Description of Artificial Sequence: Synthetic oligonucleotide
taataagctcaggtataaacct

SEQ ID NO: 1128 - DNA, 22 bp, Artificial Sequence
  Description of Artificial Sequence: Synthetic oligonucleotide
ttcacttccagcggtactgggc

SEQ ID NO: 1129 - DNA, 22 bp, Artificial Sequence
  Description of Artificial Sequence: Synthetic oligonucleotide
ttgaattaagaatagatagcct

SEQ ID NO: 1130 - DNA, 22 bp, Artificial Sequence
  Description of Artificial Sequence: Synthetic oligonucleotide
ttaaacttaactttggcacggg

SEQ ID NO: 1131 - DNA, 22 bp, Artificial Sequence
  Description of Artificial Sequence: Synthetic oligonucleotide
attaaacttaactttggcacgg

SEQ ID NO: 1132 - DNA, 22 bp, Artificial Sequence
  Description of Artificial Sequence: Synthetic oligonucleotide
aactgcaagacacttctcagga

SEQ ID NO: 1133 - DNA, 22 bp, Artificial Sequence
  Description of Artificial Sequence: Synthetic oligonucleotide
tttcagattcatttattgaggg

SEQ ID NO: 1134 - DNA, 22 bp, Artificial Sequence
  Description of Artificial Sequence: Synthetic oligonucleotide
tttcttcagcgtatagactcga

SEQ ID NO: 1135 - DNA, 22 bp, Artificial Sequence
  Description of Artificial Sequence: Synthetic oligonucleotide
atacttaagagctttgcatcct

SEQ ID NO: 1136 - DNA, 22 bp, Artificial Sequence
  Description of Artificial Sequence: Synthetic oligonucleotide
atcttctatgggtttgtggcac

SEQ ID NO: 1137 - DNA, 22 bp, Artificial Sequence
  Description of Artificial Sequence: Synthetic oligonucleotide
aatgtgatcatctttgtcggcc

SEQ ID NO: 1138 - DNA, 22 bp, Artificial Sequence
  Description of Artificial Sequence: Synthetic oligonucleotide
taaagtgatcacttcgtcggcc

SEQ ID NO: 1139 - DNA, 22 bp, Artificial Sequence
  Description of Artificial Sequence: Synthetic oligonucleotide
ttagttctggagttgttagcgt

SEQ ID NO: 1140 - DNA, 22 bp, Artificial Sequence
  Description of Artificial Sequence: Synthetic oligonucleotide
atacacaatgcgcccgttggcc

SEQ ID NO: 1141 - DNA, 22 bp, Artificial Sequence
  Description of Artificial Sequence: Synthetic oligonucleotide
atgcaatttcaggagcaaagct

SEQ ID NO: 1142 - DNA, 22 bp, Artificial Sequence
  Description of Artificial Sequence: Synthetic oligonucleotide
ttatcccaagggatgagagccg

SEQ ID NO: 1143 - DNA, 22 bp, Artificial Sequence
  Description of Artificial Sequence: Synthetic oligonucleotide
tttgtagttccagacactgcca

SEQ ID NO: 1144 - DNA, 22 bp, Artificial Sequence
  Description of Artificial Sequence: Synthetic oligonucleotide
atttagcaaactcggttatcct

SEQ ID NO: 1145 - DNA, 22 bp, Artificial Sequence
  Description of Artificial Sequence: Synthetic oligonucleotide
acttagtaggcgagtgtccggg

SEQ ID NO: 1146 - DNA, 22 bp, Artificial Sequence
  Description of Artificial Sequence: Synthetic oligonucleotide
ttactattccacagttcagccc

SEQ ID NO: 1147 - DNA, 22 bp, Artificial Sequence
  Description of Artificial Sequence: Synthetic oligonucleotide
gtagtatacctgtttgaggccc

SEQ ID NO: 1148 - DNA, 22 bp, Artificial Sequence
  Description of Artificial Sequence: Synthetic oligonucleotide
atacattcatacatatcttcct

SEQ ID NO: 1149 - DNA, 22 bp, Artificial Sequence
  Description of Artificial Sequence: Synthetic oligonucleotide
taaagtggtaaagtggaggccc

SEQ ID NO: 1150 - DNA, 22 bp, Artificial Sequence
  Description of Artificial Sequence: Synthetic oligonucleotide
ttaaagggtgacatcttctggc

SEQ ID NO: 1151 - DNA, 22 bp, Artificial Sequence
  Description of Artificial Sequence: Synthetic oligonucleotide
aatatgatcgagactatagcga

SEQ ID NO: 1152 - DNA, 22 bp, Artificial Sequence
  Description of Artificial Sequence: Synthetic oligonucleotide
tattccaatgactgccagaggg

SEQ ID NO: 1153 - DNA, 22 bp, Artificial Sequence
  Description of Artificial Sequence: Synthetic oligonucleotide
atttcataggaactagcaagcc

SEQ ID NO: 1154 - DNA, 22 bp, Artificial Sequence
  Description of Artificial Sequence: Synthetic oligonucleotide
ataggttagaggtatttgaggt

SEQ ID NO: 1155 - DNA, 22 bp, Artificial Sequence
  Description of Artificial Sequence: Synthetic oligonucleotide
atttggtgtgagattctatggt

SEQ ID NO: 1156 - DNA, 22 bp, Artificial Sequence
  Description of Artificial Sequence: Synthetic oligonucleotide
atttacagtaagaatctcagga

SEQ ID NO: 1157 - DNA, 22 bp, Artificial Sequence
  Description of Artificial Sequence: Synthetic oligonucleotide
tatagatataaatttgccgcgc

SEQ ID NO: 1158 - DNA, 22 bp, Artificial Sequence
  Description of Artificial Sequence: Synthetic oligonucleotide
ttcttgagtaaagtcaagggcg

SEQ ID NO: 1159 - DNA, 22 bp, Artificial Sequence
  Description of Artificial Sequence: Synthetic oligonucleotide
aatagttctctcagcttctgct

SEQ ID NO: 1160 - DNA, 22 bp, Artificial Sequence
  Description of Artificial Sequence: Synthetic oligonucleotide
atcatttacaatacatagccct

SEQ ID NO: 1161 - DNA, 22 bp, Artificial Sequence
  Description of Artificial Sequence: Synthetic oligonucleotide
tttctttgagggaaattaacgc

SEQ ID NO: 1162 - DNA, 22 bp, Artificial Sequence
  Description of Artificial Sequence: Synthetic oligonucleotide
ttccagtatctcattgacggcc

SEQ ID NO: 1163 - DNA, 22 bp, Artificial Sequence
  Description of Artificial Sequence: Synthetic oligonucleotide
ttagggtctaaacgttcaagga

SEQ ID NO: 1164 - DNA, 22 bp, Artificial Sequence
  Description of Artificial Sequence: Synthetic oligonucleotide
attaaatgatccatagacgcca

SEQ ID NO: 1165 - DNA, 22 bp, Artificial Sequence
  Description of Artificial Sequence: Synthetic oligonucleotide
ttgtagaaccagttcttgtccc

SEQ ID NO: 1166 - DNA, 22 bp, Artificial Sequence
  Description of Artificial Sequence: Synthetic oligonucleotide
atgctgtaagtagggctgcggt

SEQ ID NO: 1167 - DNA, 22 bp, Artificial Sequence
  Description of Artificial Sequence: Synthetic oligonucleotide
ttctatcgtcatcttctctgct

SEQ ID NO: 1168 - DNA, 22 bp, Artificial Sequence
  Description of Artificial Sequence: Synthetic oligonucleotide
attagtattcataacaactgct

SEQ ID NO: 1169 - DNA, 22 bp, Artificial Sequence
  Description of Artificial Sequence: Synthetic oligonucleotide
ttgagattggatatgaccatca

SEQ ID NO: 1170 - DNA, 22 bp, Artificial Sequence
  Description of Artificial Sequence: Synthetic oligonucleotide
aagagggaaacttgcatctcgg

SEQ ID NO: 1171 - DNA, 22 bp, Artificial Sequence
  Description of Artificial Sequence: Synthetic oligonucleotide
attatcagctgaatgcagactt

SEQ ID NO: 1172 - DNA, 22 bp, Artificial Sequence
  Description of Artificial Sequence: Synthetic oligonucleotide
ctattaggtgagatgagcaggt

SEQ ID NO: 1173 - DNA, 22 bp, Artificial Sequence
  Description of Artificial Sequence: Synthetic oligonucleotide
taagaacacccggtattctggg

SEQ ID NO: 1174 - DNA, 22 bp, Artificial Sequence
  Description of Artificial Sequence: Synthetic oligonucleotide
ataatccagcaaccagcagggc

SEQ ID NO: 1175 - DNA, 22 bp, Artificial Sequence
  Description of Artificial Sequence: Synthetic oligonucleotide
aagagagaaataaatttgccct

SEQ ID NO: 1176 - DNA, 22 bp, Artificial Sequence
  Description of Artificial Sequence: Synthetic oligonucleotide
tttgcagagttaatcctcagca

SEQ ID NO: 1177 - DNA, 22 bp, Artificial Sequence
  Description of Artificial Sequence: Synthetic oligonucleotide
ttagaaaccatgtctgccagga

SEQ ID NO: 1178 - DNA, 22 bp, Artificial Sequence
  Description of Artificial Sequence: Synthetic oligonucleotide
ataagtacaggatactgcaggg

SEQ ID NO: 1179 - DNA, 22 bp, Artificial Sequence
  Description of Artificial Sequence: Synthetic oligonucleotide
taaagaatgcacacaggatccc

SEQ ID NO: 1180 - DNA, 22 bp, Artificial Sequence
  Description of Artificial Sequence: Synthetic oligonucleotide
attgggttcttaagtgcctggc

SEQ ID NO: 1181 - DNA, 22 bp, Artificial Sequence
  Description of Artificial Sequence: Synthetic oligonucleotide
tttcgaagagaaaccaggatga

SEQ ID NO: 1182 - DNA, 22 bp, Artificial Sequence
  Description of Artificial Sequence: Synthetic oligonucleotide
ttcgttagggtcataatttcca

SEQ ID NO: 1183 - DNA, 22 bp, Artificial Sequence
  Description of Artificial Sequence: Synthetic oligonucleotide
atacatgggcacatgaaggtta

SEQ ID NO: 1184 - DNA, 22 bp, Artificial Sequence
  Description of Artificial Sequence: Synthetic oligonucleotide
attggcgatagatttgggagcc

SEQ ID NO: 1185 - DNA, 22 bp, Artificial Sequence
  Description of Artificial Sequence: Synthetic oligonucleotide
tattaggctgacagagaatcca

SEQ ID NO: 1186 - DNA, 22 bp, Artificial Sequence
  Description of Artificial Sequence: Synthetic oligonucleotide
aataaggagacaactgagaggt

SEQ ID NO: 1187 - DNA, 22 bp, Artificial Sequence
  Description of Artificial Sequence: Synthetic oligonucleotide
gaaatgtggcatagatgggcca

SEQ ID NO: 1188 - DNA, 22 bp, Artificial Sequence
  Description of Artificial Sequence: Synthetic oligonucleotide
aacagtcacatttctgtcagcc

SEQ ID NO: 1189 - DNA, 22 bp, Artificial Sequence
  Description of Artificial Sequence: Synthetic oligonucleotide
ttagactatttcccgagctgct

SEQ ID NO: 1190 - DNA, 22 bp, Artificial Sequence
  Description of Artificial Sequence: Synthetic oligonucleotide
ttaagctcatcaatcttgggtt

SEQ ID NO: 1191 - DNA, 22 bp, Artificial Sequence
  Description of Artificial Sequence: Synthetic oligonucleotide
gtaatactcaatatggtctcct

SEQ ID NO: 1192 - DNA, 22 bp, Artificial Sequence
  Description of Artificial Sequence: Synthetic oligonucleotide
tttgattctaattccataacct

SEQ ID NO: 1193 - DNA, 22 bp, Artificial Sequence
  Description of Artificial Sequence: Synthetic oligonucleotide
taagtaaggagatgaatgtgcg

SEQ ID NO: 1194 - DNA, 22 bp, Artificial Sequence
  Description of Artificial Sequence: Synthetic oligonucleotide
ttagttgtgccatagaccaggt

SEQ ID NO: 1195 - DNA, 22 bp, Artificial Sequence
  Description of Artificial Sequence: Synthetic oligonucleotide
ttgtataagtaggtggagaccc

SEQ ID NO: 1196 - DNA, 22 bp, Artificial Sequence
  Description of Artificial Sequence: Synthetic oligonucleotide
atactgcagaagttgctgggcc

SEQ ID NO: 1197 - DNA, 22 bp, Artificial Sequence
  Description of Artificial Sequence: Synthetic oligonucleotide
caatggctaatcaatgtccggc

SEQ ID NO: 1198 - DNA, 22 bp, Artificial Sequence
  Description of Artificial Sequence: Synthetic oligonucleotide
tttacaaatgcagtttatccct

SEQ ID NO: 1199 - DNA, 22 bp, Artificial Sequence
  Description of Artificial Sequence: Synthetic oligonucleotide
atctaacttcagttcaagaggt

SEQ ID NO: 1200 - DNA, 22 bp, Artificial Sequence
  Description of Artificial Sequence: Synthetic oligonucleotide
tattggactatcacggtctggc

SEQ ID NO: 1201 - DNA, 22 bp, Artificial Sequence
  Description of Artificial Sequence: Synthetic oligonucleotide
attacagaggtgatgcaatggg

SEQ ID NO: 1202 - DNA, 22 bp, Artificial Sequence
  Description of Artificial Sequence: Synthetic oligonucleotide
aatgcagttcaggtactgaccc

SEQ ID NO: 1203 - DNA, 22 bp, Artificial Sequence
  Description of Artificial Sequence: Synthetic oligonucleotide
ataaggtaattctctactgctt

SEQ ID NO: 1204 - DNA, 22 bp, Artificial Sequence
  Description of Artificial Sequence: Synthetic oligonucleotide
tttagcctttacatggttagct

SEQ ID NO: 1205 - DNA, 22 bp, Artificial Sequence
  Description of Artificial Sequence: Synthetic oligonucleotide
atgcaataacggaagaaatgct

SEQ ID NO: 1206 - DNA, 22 bp, Artificial Sequence
  Description of Artificial Sequence: Synthetic oligonucleotide
ataaattcacaaatgggccgca

SEQ ID NO: 1207 - DNA, 22 bp, Artificial Sequence
  Description of Artificial Sequence: Synthetic oligonucleotide
tttgattagacaatcctccctg

SEQ ID NO: 1208 - DNA, 22 bp, Artificial Sequence
  Description of Artificial Sequence: Synthetic oligonucleotide
gttgaataggaactccttctcc

SEQ ID NO: 1209 - DNA, 22 bp, Artificial Sequence
  Description of Artificial Sequence: Synthetic oligonucleotide
tttattgactgacttgctagct

SEQ ID NO: 1210 - DNA, 22 bp, Artificial Sequence
  Description of Artificial Sequence: Synthetic oligonucleotide
tttgacctttctgttctgagcc

SEQ ID NO: 1211 - DNA, 22 bp, Artificial Sequence
  Description of Artificial Sequence: Synthetic oligonucleotide
atattatcactcaaaccttgct

SEQ ID NO: 1212 - DNA, 22 bp, Artificial Sequence
  Description of Artificial Sequence: Synthetic oligonucleotide
ttctgttcactgagattcagct

SEQ ID NO: 1213 - DNA, 22 bp, Artificial Sequence
  Description of Artificial Sequence: Synthetic oligonucleotide
tatgaggatctgatgcagtcca

SEQ ID NO: 1214 - DNA, 22 bp, Artificial Sequence
  Description of Artificial Sequence: Synthetic oligonucleotide
ataacctcctccatgatggccc

SEQ ID NO: 1215 - DNA, 22 bp, Artificial Sequence
  Description of Artificial Sequence: Synthetic oligonucleotide
attagctttccagacgtgggca

SEQ ID NO: 1216 - DNA, 22 bp, Artificial Sequence
  Description of Artificial Sequence: Synthetic oligonucleotide
tatagtaggagactgacttggt

SEQ ID NO: 1217 - DNA, 22 bp, Artificial Sequence
  Description of Artificial Sequence: Synthetic oligonucleotide
atatagtccgcatttccaggcc

SEQ ID NO: 1218 - DNA, 22 bp, Artificial Sequence
  Description of Artificial Sequence: Synthetic oligonucleotide
atagagcactgaatacaagccc

SEQ ID NO: 1219 - DNA, 22 bp, Artificial Sequence
  Description of Artificial Sequence: Synthetic oligonucleotide
ataacaggtgtatttctcgggc

SEQ ID NO: 1220 - DNA, 22 bp, Artificial Sequence
  Description of Artificial Sequence: Synthetic oligonucleotide
taacaggtgtatttctcgggca

SEQ ID NO: 1221 - DNA, 22 bp, Artificial Sequence
  Description of Artificial Sequence: Synthetic oligonucleotide
gtctggaatcagagtctttggc

SEQ ID NO: 1222 - DNA, 22 bp, Artificial Sequence
  Description of Artificial Sequence: Synthetic oligonucleotide
aataatatgagactagtgggct

SEQ ID NO: 1223 - DNA, 22 bp, Artificial Sequence
  Description of Artificial Sequence: Synthetic oligonucleotide
ttcttctatactattgtgagga

SEQ ID NO: 1224 - DNA, 22 bp, Artificial Sequence
  Description of Artificial Sequence: Synthetic oligonucleotide
tttatgtgaaagttaaagccca

SEQ ID NO: 1225 - DNA, 22 bp, Artificial Sequence
  Description of Artificial Sequence: Synthetic oligonucleotide
atttccaacacagacatatcca

SEQ ID NO: 1226 - DNA, 22 bp, Artificial Sequence
  Description of Artificial Sequence: Synthetic oligonucleotide
tttattggaaagtggatgagag

SEQ ID NO: 1227 - DNA, 22 bp, Artificial Sequence
  Description of Artificial Sequence: Synthetic oligonucleotide
taaagctctagaatgatccgga

SEQ ID NO: 1228 - DNA, 22 bp, Artificial Sequence
  Description of Artificial Sequence: Synthetic oligonucleotide
attgagaatgcatgaggaagcc

SEQ ID NO: 1229 - DNA, 22 bp, Artificial Sequence
  Description of Artificial Sequence: Synthetic oligonucleotide
atactggactttaatgactggt

SEQ ID NO: 1230 - DNA, 22 bp, Artificial Sequence
  Description of Artificial Sequence: Synthetic oligonucleotide
ataaatactgtgtgacggtggc

SEQ ID NO: 1231 - DNA, 22 bp, Artificial Sequence
  Description of Artificial Sequence: Synthetic oligonucleotide
attcagttcaaggcacatacgt

SEQ ID NO: 1232 - DNA, 22 bp, Artificial Sequence
  Description of Artificial Sequence: Synthetic oligonucleotide
ttaaacttgaaatggctcggca

SEQ ID NO: 1233 - DNA, 22 bp, Artificial Sequence
  Description of Artificial Sequence: Synthetic oligonucleotide
ataaacatacggaggagtcggc

SEQ ID NO: 1234 - DNA, 22 bp, Artificial Sequence
  Description of Artificial Sequence: Synthetic oligonucleotide
taacagactaacaagcatgggc

SEQ ID NO: 1235 - DNA, 22 bp, Artificial Sequence
  Description of Artificial Sequence: Synthetic oligonucleotide
ataagaggtgaaggtattcgga

SEQ ID NO: 1236 - DNA, 22 bp, Artificial Sequence
  Description of Artificial Sequence: Synthetic oligonucleotide
tatgtgtcattgatgatggcca

SEQ ID NO: 1237 - DNA, 22 bp, Artificial Sequence
  Description of Artificial Sequence: Synthetic oligonucleotide
ttactgggtgaacacttgagcc

SEQ ID NO: 1238 - DNA, 22 bp, Artificial Sequence
  Description of Artificial Sequence: Synthetic oligonucleotide
attcaccaaattcccatgggcc

SEQ ID NO: 1239 - DNA, 22 bp, Artificial Sequence
  Description of Artificial Sequence: Synthetic oligonucleotide
atatacttcaagacactcgcca

SEQ ID NO: 1240 - DNA, 22 bp, Artificial Sequence
  Description of Artificial Sequence: Synthetic oligonucleotide
ttcaagctccaggattgggccc

SEQ ID NO: 1241 - DNA, 22 bp, Artificial Sequence
  Description of Artificial Sequence: Synthetic oligonucleotide
atagtggaccagatcattgcag

SEQ ID NO: 1242 - DNA, 22 bp, Artificial Sequence
  Description of Artificial Sequence: Synthetic oligonucleotide
tagtatgaagccacgtggacgc

SEQ ID NO: 1243 - DNA, 22 bp, Artificial Sequence
  Description of Artificial Sequence: Synthetic oligonucleotide
atgaactcccatttaattcctt

SEQ ID NO: 1244 - DNA, 22 bp, Artificial Sequence
  Description of Artificial Sequence: Synthetic oligonucleotide
tttagtgcacatattaactggt

SEQ ID NO: 1245 - DNA, 22 bp, Artificial Sequence
  Description of Artificial Sequence: Synthetic oligonucleotide
atcagaacaaatctccttgggc

SEQ ID NO: 1246 - DNA, 22 bp, Artificial Sequence
  Description of Artificial Sequence: Synthetic oligonucleotide
ttattcttgctgtagagcgcgt

SEQ ID NO: 1247 - DNA, 22 bp, Artificial Sequence
  Description of Artificial Sequence: Synthetic oligonucleotide
tgtaattaggagtcccacacag

SEQ ID NO: 1248 - DNA, 22 bp, Artificial Sequence
  Description of Artificial Sequence: Synthetic oligonucleotide
tattctgtacaattcatatggt

SEQ ID NO: 1249 - DNA, 22 bp, Artificial Sequence
  Description of Artificial Sequence: Synthetic oligonucleotide
tttgtcaaatctgtcatctcgt

SEQ ID NO: 1250 - DNA, 22 bp, Artificial Sequence
  Description of Artificial Sequence: Synthetic oligonucleotide
aagaaacacaatccagtggcca

SEQ ID NO: 1251 - DNA, 22 bp, Artificial Sequence
  Description of Artificial Sequence: Synthetic oligonucleotide
ataaacttgtcatagattcgct

SEQ ID NO: 1252 - DNA, 22 bp, Artificial Sequence
  Description of Artificial Sequence: Synthetic oligonucleotide
tatttctcacacctgctcgcgt

SEQ ID NO: 1253 - DNA, 22 bp, Artificial Sequence
  Description of Artificial Sequence: Synthetic oligonucleotide
aacatacagatctagctgccct

SEQ ID NO: 1254 - DNA, 22 bp, Artificial Sequence
  Description of Artificial Sequence: Synthetic oligonucleotide
atgaatgcccacatagggccgg

SEQ ID NO: 1255 - DNA, 22 bp, Artificial Sequence
  Description of Artificial Sequence: Synthetic oligonucleotide
taatgatgaactctaaattggg

SEQ ID NO: 1256 - DNA, 22 bp, Artificial Sequence
  Description of Artificial Sequence: Synthetic oligonucleotide
atatctaatcctttgagctcct

SEQ ID NO: 1257 - DNA, 22 bp, Artificial Sequence
  Description of Artificial Sequence: Synthetic oligonucleotide
ttgattctgaagtgaagctggg

SEQ ID NO: 1258 - DNA, 22 bp, Artificial Sequence
  Description of Artificial Sequence: Synthetic oligonucleotide
tttccagataaagctggtccgc

SEQ ID NO: 1259 - DNA, 22 bp, Artificial Sequence
  Description of Artificial Sequence: Synthetic oligonucleotide
attcacagtcatcttggtgcct

SEQ ID NO: 1260 - DNA, 22 bp, Artificial Sequence
  Description of Artificial Sequence: Synthetic oligonucleotide
gaagcaggtagggagaagaggt

SEQ ID NO: 1261 - DNA, 22 bp, Artificial Sequence
  Description of Artificial Sequence: Synthetic oligonucleotide
tttgttgatttccagagcacgg

SEQ ID NO: 1262 - DNA, 22 bp, Artificial Sequence
  Description of Artificial Sequence: Synthetic oligonucleotide
ttaaactgcattagtaagcgct

SEQ ID NO: 1263 - DNA, 22 bp, Artificial Sequence
  Description of Artificial Sequence: Synthetic oligonucleotide
taaatgtatcttggtgactcca

SEQ ID NO: 1264 - DNA, 22 bp, Artificial Sequence
  Description of Artificial Sequence: Synthetic oligonucleotide
aatgagacactgcacatcaggg

SEQ ID NO: 1265 - DNA, 22 bp, Artificial Sequence
  Description of Artificial Sequence: Synthetic oligonucleotide
tataatgatctcgaacccgggc

SEQ ID NO: 1266 - DNA, 22 bp, Artificial Sequence
  Description of Artificial Sequence: Synthetic oligonucleotide
tttacatctaagattagatcca

SEQ ID NO: 1267 - DNA, 22 bp, Artificial Sequence
  Description of Artificial Sequence: Synthetic oligonucleotide
ttgtgatttaatgatgtttccc

SEQ ID NO: 1268 - DNA, 22 bp, Artificial Sequence
  Description of Artificial Sequence: Synthetic oligonucleotide
tttatatacaaggcaacgccca

SEQ ID NO: 1269 - DNA, 22 bp, Artificial Sequence
  Description of Artificial Sequence: Synthetic oligonucleotide
aatacatttgagttaaagagtg

SEQ ID NO: 1270 - DNA, 22 bp, Artificial Sequence
  Description of Artificial Sequence: Synthetic oligonucleotide
taattcactctatttcagtgga

SEQ ID NO: 1271 - DNA, 22 bp, Artificial Sequence
  Description of Artificial Sequence: Synthetic oligonucleotide
tttctttcggtgtctgtgtgct

SEQ ID NO: 1272 - DNA, 22 bp, Artificial Sequence
  Description of Artificial Sequence: Synthetic oligonucleotide
tttgaggtccagtttctcggcg

SEQ ID NO: 1273 - DNA, 22 bp, Artificial Sequence
  Description of Artificial Sequence: Synthetic oligonucleotide
tttaaggtccagtttctcagcg

SEQ ID NO: 1274 - DNA, 22 bp, Artificial Sequence
  Description of Artificial Sequence: Synthetic oligonucleotide
ttctctttccaagacagcacga

SEQ ID NO: 1275 - DNA, 22 bp, Artificial Sequence
  Description of Artificial Sequence: Synthetic oligonucleotide
aagcttcatgacttgcaaagcc

SEQ ID NO: 1276 - DNA, 22 bp, Artificial Sequence
  Description of Artificial Sequence: Synthetic oligonucleotide
ttaatgacttccttagtcacct

SEQ ID NO: 1277 - DNA, 22 bp, Artificial Sequence
  Description of Artificial Sequence: Synthetic oligonucleotide
atatcatgagtctttctgagct

SEQ ID NO: 1278 - DNA, 22 bp, Artificial Sequence
  Description of Artificial Sequence: Synthetic oligonucleotide
atcagcaaggaaggtgtgggct

SEQ ID NO: 1279 - DNA, 22 bp, Artificial Sequence
  Description of Artificial Sequence: Synthetic oligonucleotide
atgtttcctaactttgtctcct

SEQ ID NO: 1280 - DNA, 22 bp, Artificial Sequence
  Description of Artificial Sequence: Synthetic oligonucleotide
tttaaacctcagcttaactgca

SEQ ID NO: 1281 - DNA, 22 bp, Artificial Sequence
  Description of Artificial Sequence: Synthetic oligonucleotide
attggagatgatattcaaacga

SEQ ID NO: 1282 - DNA, 22 bp, Artificial Sequence
  Description of Artificial Sequence: Synthetic oligonucleotide
atgtttaacaaattcaattccc

SEQ ID NO: 1283 - DNA, 22 bp, Artificial Sequence
  Description of Artificial Sequence: Synthetic oligonucleotide
aatgaggtaggtggtaggaggg

SEQ ID NO: 1284 - DNA, 22 bp, Artificial Sequence
  Description of Artificial Sequence: Synthetic oligonucleotide
attgactgacggagaacaagct

SEQ ID NO: 1285 - DNA, 22 bp, Artificial Sequence
  Description of Artificial Sequence: Synthetic oligonucleotide
ttagcttaagcctgtctgctga

SEQ ID NO: 1286 - DNA, 22 bp, Artificial Sequence
  Description of Artificial Sequence: Synthetic oligonucleotide
ttagaaagtgatgttaaagcct

SEQ ID NO: 1287 - DNA, 22 bp, Artificial Sequence
  Description of Artificial Sequence: Synthetic oligonucleotide
ttattgtattgaggtcacaggt

SEQ ID NO: 1288 - DNA, 22 bp, Artificial Sequence
  Description of Artificial Sequence: Synthetic oligonucleotide
tattgttctcaggagtcccggg

SEQ ID NO: 1289 - DNA, 22 bp, Artificial Sequence
  Description of Artificial Sequence: Synthetic oligonucleotide
taaggaaacaccctaattgcct

SEQ ID NO: 1290 - DNA, 22 bp, Artificial Sequence
  Description of Artificial Sequence: Synthetic oligonucleotide
ttgttctataggaaggactcgt

SEQ ID NO: 1291 - DNA, 22 bp, Artificial Sequence
  Description of Artificial Sequence: Synthetic oligonucleotide
ataaacatgattagagacaggg

SEQ ID NO: 1292 - DNA, 22 bp, Artificial Sequence
  Description of Artificial Sequence: Synthetic oligonucleotide
atcttggttaccactatcacca

SEQ ID NO: 1293 - DNA, 22 bp, Artificial Sequence
  Description of Artificial Sequence: Synthetic oligonucleotide
aattcaagtcataccctggcca

SEQ ID NO: 1294 - DNA, 22 bp, Artificial Sequence
  Description of Artificial Sequence: Synthetic oligonucleotide
atgtcgttcagtttgttctccg

SEQ ID NO: 1295 - DNA, 22 bp, Artificial Sequence
  Description of Artificial Sequence: Synthetic oligonucleotide
taataatgtaaggcacaaacca

SEQ ID NO: 1296 - DNA, 22 bp, Artificial Sequence
  Description of Artificial Sequence: Synthetic oligonucleotide
tttctcttgctccacatatgcc

SEQ ID NO: 1297 - DNA, 22 bp, Artificial Sequence
  Description of Artificial Sequence: Synthetic oligonucleotide
aatagttagcagatggacaggt

SEQ ID NO: 1298 - DNA, 22 bp, Artificial Sequence
  Description of Artificial Sequence: Synthetic oligonucleotide
ttatttccaatgcatgtggcct

SEQ ID NO: 1299 - DNA, 22 bp, Artificial Sequence
  Description of Artificial Sequence: Synthetic oligonucleotide
aatacctttgagcaatgagcct

SEQ ID NO: 1300 - DNA, 22 bp, Artificial Sequence
  Description of Artificial Sequence: Synthetic oligonucleotide
ttctcttctccacagctaggca

SEQ ID NO: 1301 - DNA, 22 bp, Artificial Sequence
  Description of Artificial Sequence: Synthetic oligonucleotide
attctcttctccacagctaggc

SEQ ID NO: 1302 - DNA, 22 bp, Artificial Sequence
  Description of Artificial Sequence: Synthetic oligonucleotide
ttgtatttccagttagctgcct

SEQ ID NO: 1303 - DNA, 22 bp, Artificial Sequence
  Description of Artificial Sequence: Synthetic oligonucleotide
aataaatggaatggaaaggcct

SEQ ID NO: 1304 - DNA, 22 bp, Artificial Sequence
  Description of Artificial Sequence: Synthetic oligonucleotide
ttgaaaccggttgtaagaacgg

SEQ ID NO: 1305 - DNA, 22 bp, Artificial Sequence
  Description of Artificial Sequence: Synthetic oligonucleotide
tataaataggatggaggatggg

SEQ ID NO: 1306 - DNA, 22 bp, Artificial Sequence
  Description of Artificial Sequence: Synthetic oligonucleotide
atttcgaagctcatagattcga

SEQ ID NO: 1307 - DNA, 22 bp, Artificial Sequence
  Description of Artificial Sequence: Synthetic oligonucleotide
attgcatactagaatcccagga

SEQ ID NO: 1308 - DNA, 22 bp, Artificial Sequence
  Description of Artificial Sequence: Synthetic oligonucleotide
taatgggtctaccttgttgggc

SEQ ID NO: 1309 - DNA, 22 bp, Artificial Sequence
  Description of Artificial Sequence: Synthetic oligonucleotide
aattaatcgaagtttgatagga

SEQ ID NO: 1310 - DNA, 22 bp, Artificial Sequence
  Description of Artificial Sequence: Synthetic oligonucleotide
atagaatacaatatccaatcgg

SEQ ID NO: 1311 - DNA, 22 bp, Artificial Sequence
  Description of Artificial Sequence: Synthetic oligonucleotide
tttcatctacctgttctcaggc

SEQ ID NO: 1312 - DNA, 22 bp, Artificial Sequence
  Description of Artificial Sequence: Synthetic oligonucleotide
tttgttcttaggaagcttggcc

SEQ ID NO: 1313 - DNA, 22 bp, Artificial Sequence
  Description of Artificial Sequence: Synthetic oligonucleotide
atttccagtagaatcatctggg

SEQ ID NO: 1314 - DNA, 22 bp, Artificial Sequence
  Description of Artificial Sequence: Synthetic oligonucleotide
aatagtcagacgcatatgtgac

SEQ ID NO: 1315 - DNA, 22 bp, Artificial Sequence
  Description of Artificial Sequence: Synthetic oligonucleotide
atactgtgtctgttactgcggc

SEQ ID NO: 1316 - DNA, 22 bp, Artificial Sequence
  Description of Artificial Sequence: Synthetic oligonucleotide
atagaccatcaaattaaacctg

SEQ ID NO: 1317 - DNA, 22 bp, Artificial Sequence
  Description of Artificial Sequence: Synthetic oligonucleotide
ttaaattatccaggtaggacca

SEQ ID NO: 1318 - DNA, 22 bp, Artificial Sequence
  Description of Artificial Sequence: Synthetic oligonucleotide
ttatacaaggataagtcagcct

SEQ ID NO: 1319 - DNA, 22 bp, Artificial Sequence
  Description of Artificial Sequence: Synthetic oligonucleotide
attccagttcgatttcaaccgt

SEQ ID NO: 1320 - DNA, 22 bp, Artificial Sequence
  Description of Artificial Sequence: Synthetic oligonucleotide
ataggcccagaagctaaggcca

SEQ ID NO: 1321 - DNA, 22 bp, Artificial Sequence
  Description of Artificial Sequence: Synthetic oligonucleotide
attccggatcacaaattgaggg

SEQ ID NO: 1322 - DNA, 22 bp, Artificial Sequence
  Description of Artificial Sequence: Synthetic oligonucleotide
atcagaaccttgtctcttaccc

SEQ ID NO: 1323 - DNA, 22 bp, Artificial Sequence
  Description of Artificial Sequence: Synthetic oligonucleotide
attctccaggaaatgcattggt

SEQ ID NO: 1324 - DNA, 22 bp, Artificial Sequence
  Description of Artificial Sequence: Synthetic oligonucleotide
tttgacctgctactggaaaggc

SEQ ID NO: 1325 - DNA, 22 bp, Artificial Sequence
  Description of Artificial Sequence: Synthetic oligonucleotide
taagtccattggaaactgaggg

SEQ ID NO: 1326 - DNA, 22 bp, Artificial Sequence
  Description of Artificial Sequence: Synthetic oligonucleotide
atatgtgacaatgttgttgcct

SEQ ID NO: 1327 - DNA, 22 bp, Artificial Sequence
  Description of Artificial Sequence: Synthetic oligonucleotide
aatggatataggagcatgtgta

SEQ ID NO: 1328 - DNA, 22 bp, Artificial Sequence
  Description of Artificial Sequence: Synthetic oligonucleotide
aagagtagatacattgtaccca

SEQ ID NO: 1329 - DNA, 22 bp, Artificial Sequence
  Description of Artificial Sequence: Synthetic oligonucleotide
tttaagggtaggactctttggg

SEQ ID NO: 1330 - DNA, 22 bp, Artificial Sequence
  Description of Artificial Sequence: Synthetic oligonucleotide
attagggaggtacctacagcgg

SEQ ID NO: 1331 - DNA, 22 bp, Artificial Sequence
  Description of Artificial Sequence: Synthetic oligonucleotide
atttcgttgtggtcaatgaggg

SEQ ID NO: 1332 - DNA, 22 bp, Artificial Sequence
  Description of Artificial Sequence: Synthetic oligonucleotide
tttcaccataacaatctctcct

SEQ ID NO: 1333 - DNA, 22 bp, Artificial Sequence
  Description of Artificial Sequence: Synthetic oligonucleotide
tttctcaaagttgacgtgtcca

SEQ ID NO: 1334 - DNA, 22 bp, Artificial Sequence
  Description of Artificial Sequence: Synthetic oligonucleotide
ataatgtaaggagttctttcgt

SEQ ID NO: 1335 - DNA, 22 bp, Artificial Sequence
  Description of Artificial Sequence: Synthetic oligonucleotide
tttgactttgggagacagagcc

SEQ ID NO: 1336 - DNA, 22 bp, Artificial Sequence
  Description of Artificial Sequence: Synthetic oligonucleotide
atattcttctttcgtctgcgca

SEQ ID NO: 1337 - DNA, 22 bp, Artificial Sequence
  Description of Artificial Sequence: Synthetic oligonucleotide
ttgtaaattgtttgccattgct

SEQ ID NO: 1338 - DNA, 22 bp, Artificial Sequence
  Description of Artificial Sequence: Synthetic oligonucleotide
tatcctgttcgcctgtcgaggt

SEQ ID NO: 1339 - DNA, 22 bp, Artificial Sequence
  Description of Artificial Sequence: Synthetic oligonucleotide
atgaaactgaacagtggatcgt

SEQ ID NO: 1340 - DNA, 22 bp, Artificial Sequence
  Description of Artificial Sequence: Synthetic oligonucleotide
atttagggttccaaagactggg

SEQ ID NO: 1341 - DNA, 22 bp, Artificial Sequence
  Description of Artificial Sequence: Synthetic oligonucleotide
tataaacattatcaattgccca

SEQ ID NO: 1342 - DNA, 22 bp, Artificial Sequence
  Description of Artificial Sequence: Synthetic oligonucleotide
ttagatttcttggttgggaccc

SEQ ID NO: 1343 - DNA, 22 bp, Artificial Sequence
  Description of Artificial Sequence: Synthetic oligonucleotide
gtagaattgcagcacaagatca

SEQ ID NO: 1344 - DNA, 22 bp, Artificial Sequence
  Description of Artificial Sequence: Synthetic oligonucleotide
attagatacagacacaatgcca

SEQ ID NO: 1345 - DNA, 22 bp, Artificial Sequence
  Description of Artificial Sequence: Synthetic oligonucleotide
caaactcattgagtcctatggt

SEQ ID NO: 1346 - DNA, 22 bp, Artificial Sequence
  Description of Artificial Sequence: Synthetic oligonucleotide
aattgggtgatgagtttccggt

SEQ ID NO: 1347 - DNA, 22 bp, Artificial Sequence
  Description of Artificial Sequence: Synthetic oligonucleotide
aatacatatggtcctaactcct

SEQ ID NO: 1348 - DNA, 22 bp, Artificial Sequence
  Description of Artificial Sequence: Synthetic oligonucleotide
tagaatgaagagactataagcc

SEQ ID NO: 1349 - DNA, 22 bp, Artificial Sequence
  Description of Artificial Sequence: Synthetic oligonucleotide
tagtaaataaacactgccagct

SEQ ID NO: 1350 - DNA, 22 bp, Artificial Sequence
  Description of Artificial Sequence: Synthetic oligonucleotide
ttagatttcgagaagtgtacca

SEQ ID NO: 1351 - DNA, 22 bp, Artificial Sequence
  Description of Artificial Sequence: Synthetic oligonucleotide
tttctccatgaatatgtcgcct

SEQ ID NO: 1352 - DNA, 22 bp, Artificial Sequence
  Description of Artificial Sequence: Synthetic oligonucleotide
tatggttctcattctatttgcc

SEQ ID NO: 1353 - DNA, 22 bp, Artificial Sequence
  Description of Artificial Sequence: Synthetic oligonucleotide
tttgctaaagggatagcttggc

SEQ ID NO: 1354 - DNA, 22 bp, Artificial Sequence
  Description of Artificial Sequence: Synthetic oligonucleotide
atatagtgaaattccaaagcca

SEQ ID NO: 1355 - DNA, 22 bp, Artificial Sequence
  Description of Artificial Sequence: Synthetic oligonucleotide
tatctgcatcaaatactgagct

SEQ ID NO: 1356 - DNA, 22 bp, Artificial Sequence
  Description of Artificial Sequence: Synthetic oligonucleotide
cttgatgctgaatttacagcgg

SEQ ID NO: 1357 - DNA, 22 bp, Artificial Sequence
  Description of Artificial Sequence: Synthetic oligonucleotide
atacaattcaatgcacacagca

SEQ ID NO: 1358 - DNA, 22 bp, Artificial Sequence
  Description of Artificial Sequence: Synthetic oligonucleotide
tttactgatggctttcttggct

SEQ ID NO: 1359 - DNA, 22 bp, Artificial Sequence
  Description of Artificial Sequence: Synthetic oligonucleotide
aagaatgttgacgtgttgcccg

SEQ ID NO: 1360 - DNA, 22 bp, Artificial Sequence
  Description of Artificial Sequence: Synthetic oligonucleotide
tttgttctcctcaagctctgca

SEQ ID NO: 1361 - DNA, 22 bp, Artificial Sequence
  Description of Artificial Sequence: Synthetic oligonucleotide
ttgttcttgaactgtagtacct

SEQ ID NO: 1362 - DNA, 22 bp, Artificial Sequence
  Description of Artificial Sequence: Synthetic oligonucleotide
tattcatcacaattaacagcct

SEQ ID NO: 1363 - DNA, 22 bp, Artificial Sequence
  Description of Artificial Sequence: Synthetic oligonucleotide
tttcacaaggagacctaaaggg

SEQ ID NO: 1364 - DNA, 22 bp, Artificial Sequence
  Description of Artificial Sequence: Synthetic oligonucleotide
atagtttaagggatatcttgct

SEQ ID NO: 1365 - DNA, 22 bp, Artificial Sequence
  Description of Artificial Sequence: Synthetic oligonucleotide
tttaagaagagaaactcctgag

SEQ ID NO: 1366 - DNA, 22 bp, Artificial Sequence
  Description of Artificial Sequence: Synthetic oligonucleotide
attatttccggtaacaacagca

SEQ ID NO: 1367 - DNA, 22 bp, Artificial Sequence
  Description of Artificial Sequence: Synthetic oligonucleotide
gtaactaggtactatgtgtgct

SEQ ID NO: 1368 - DNA, 22 bp, Artificial Sequence
  Description of Artificial Sequence: Synthetic oligonucleotide
ttcttatagacgttccggacgg

SEQ ID NO: 1369 - DNA, 22 bp, Artificial Sequence
  Description of Artificial Sequence: Synthetic oligonucleotide
ttcttgacttctttgatatcct

SEQ ID NO: 1370 - DNA, 22 bp, Artificial Sequence
  Description of Artificial Sequence: Synthetic oligonucleotide
ttgtctgatcatcttcagagtc

SEQ ID NO: 1371 - DNA, 22 bp, Artificial Sequence
  Description of Artificial Sequence: Synthetic oligonucleotide
ttgtaggaaagcctacgtcggt

SEQ ID NO: 1372 - DNA, 22 bp, Artificial Sequence
  Description of Artificial Sequence: Synthetic oligonucleotide
ttaataactgtgagaacacggg

SEQ ID NO: 1373 - DNA, 22 bp, Artificial Sequence
  Description of Artificial Sequence: Synthetic oligonucleotide
attaacccatttattacaggcc

SEQ ID NO: 1374 - DNA, 22 bp, Artificial Sequence
  Description of Artificial Sequence: Synthetic oligonucleotide
tttcagcttgatatggtaacat

SEQ ID NO: 1375 - DNA, 22 bp, Artificial Sequence
  Description of Artificial Sequence: Synthetic oligonucleotide
ttacaacaacaaatatgatgag

SEQ ID NO: 1376 - DNA, 22 bp, Artificial Sequence
  Description of Artificial Sequence: Synthetic oligonucleotide
ttacacaccagaactaacagca

SEQ ID NO: 1377 - DNA, 22 bp, Artificial Sequence
  Description of Artificial Sequence: Synthetic oligonucleotide
atttgaaatactcttcaatgac

SEQ ID NO: 1378 - DNA, 22 bp, Artificial Sequence
  Description of Artificial Sequence: Synthetic oligonucleotide
atgtgtagggcggtgataccca

SEQ ID NO: 1379 - DNA, 22 bp, Artificial Sequence
  Description of Artificial Sequence: Synthetic oligonucleotide
aattcgcttcatcagatgcgtg

SEQ ID NO: 1380 - DNA, 22 bp, Artificial Sequence
  Description of Artificial Sequence: Synthetic oligonucleotide
atctctttgtccctgaggtgtc

SEQ ID NO: 1381 - DNA, 22 bp, Artificial Sequence
  Description of Artificial Sequence: Synthetic oligonucleotide
ttgataagtcctttactaagga

SEQ ID NO: 1382 - DNA, 22 bp, Artificial Sequence
  Description of Artificial Sequence: Synthetic oligonucleotide
ataagccaaaccagtgtcatct

SEQ ID NO: 1383 - DNA, 22 bp, Artificial Sequence
  Description of Artificial Sequence: Synthetic oligonucleotide
attggctatgggtacccaaggg

SEQ ID NO: 1384 - DNA, 22 bp, Artificial Sequence
  Description of Artificial Sequence: Synthetic oligonucleotide
taattgtaagagaaatctcggt

SEQ ID NO: 1385 - DNA, 22 bp, Artificial Sequence
  Description of Artificial Sequence: Synthetic oligonucleotide
taaatagtttcaaagatctgct

SEQ ID NO: 1386 - DNA, 22 bp, Artificial Sequence
  Description of Artificial Sequence: Synthetic oligonucleotide
attggaaagatgacaaaccggc

SEQ ID NO: 1387 - DNA, 22 bp, Artificial Sequence
  Description of Artificial Sequence: Synthetic oligonucleotide
aaggaggataagagtgtcagga

SEQ ID NO: 1388 - DNA, 22 bp, Artificial Sequence
  Description of Artificial Sequence: Synthetic oligonucleotide
ttaaatcctcaaataagttctt

SEQ ID NO: 1389 - DNA, 22 bp, Artificial Sequence
  Description of Artificial Sequence: Synthetic oligonucleotide
taagttcttaatctccaaagtc

SEQ ID NO: 1390 - DNA, 22 bp, Artificial Sequence
  Description of Artificial Sequence: Synthetic oligonucleotide
tttaagccttatatgccaggct

SEQ ID NO: 1391 - DNA, 22 bp, Artificial Sequence
  Description of Artificial Sequence: Synthetic oligonucleotide
tttgctgatgatctcttgggcc

SEQ ID NO: 1392 - DNA, 22 bp, Artificial Sequence
  Description of Artificial Sequence: Synthetic oligonucleotide
aacacaatctggataatgtccg

SEQ ID NO: 1393 - DNA, 22 bp, Artificial Sequence
  Description of Artificial Sequence: Synthetic oligonucleotide
ttcggctttggctttggatccg

SEQ ID NO: 1394 - DNA, 22 bp, Artificial Sequence
  Description of Artificial Sequence: Synthetic oligonucleotide
aacaggtagaggatggtgaggc

SEQ ID NO: 1395 - DNA, 22 bp, Artificial Sequence
  Description of Artificial Sequence: Synthetic oligonucleotide
atcaggaattggatcagtaggc

SEQ ID NO: 1396 - DNA, 22 bp, Artificial Sequence
  Description of Artificial Sequence: Synthetic oligonucleotide
ttggacaccaactctgtaagga

SEQ ID NO: 1397 - DNA, 22 bp, Artificial Sequence
  Description of Artificial Sequence: Synthetic oligonucleotide
atgtgtttaaccagagatccgg

SEQ ID NO: 1398 - DNA, 22 bp, Artificial Sequence
  Description of Artificial Sequence: Synthetic oligonucleotide
ataattcaggacgctctctgct

SEQ ID NO: 1399 - DNA, 22 bp, Artificial Sequence
  Description of Artificial Sequence: Synthetic oligonucleotide
tttaactatgacatccctggag

SEQ ID NO: 1400 - DNA, 22 bp, Artificial Sequence
  Description of Artificial Sequence: Synthetic oligonucleotide
ttgaatgaactgtcactccgga

SEQ ID NO: 1401 - DNA, 22 bp, Artificial Sequence
  Description of Artificial Sequence: Synthetic oligonucleotide
ttccctgtggaggcgcagaggc

SEQ ID NO: 1402 - DNA, 22 bp, Artificial Sequence
  Description of Artificial Sequence: Synthetic oligonucleotide
atattcaatgtagttgcctcct

SEQ ID NO: 1403 - DNA, 22 bp, Artificial Sequence
  Description of Artificial Sequence: Synthetic oligonucleotide
atatatatgagaaggatcagca

SEQ ID NO: 1404 - DNA, 22 bp, Artificial Sequence
  Description of Artificial Sequence: Synthetic oligonucleotide
ttaagacatctttgtctgggct

SEQ ID NO: 1405 - DNA, 22 bp, Artificial Sequence
  Description of Artificial Sequence: Synthetic oligonucleotide
tatactcttcccaatcaaagcc

SEQ ID NO: 1406 - DNA, 22 bp, Artificial Sequence
  Description of Artificial Sequence: Synthetic oligonucleotide
ttcctccagttgattaatagct

SEQ ID NO: 1407 - DNA, 22 bp, Artificial Sequence
  Description of Artificial Sequence: Synthetic oligonucleotide
ttgttgatcttctttacttccc

SEQ ID NO: 1408 - DNA, 22 bp, Artificial Sequence
  Description of Artificial Sequence: Synthetic oligonucleotide
attccacttggtgtgatgagcc

SEQ ID NO: 1409 - DNA, 22 bp, Artificial Sequence
  Description of Artificial Sequence: Synthetic oligonucleotide
ttatgattatcgaactgagcca

SEQ ID NO: 1410 - DNA, 22 bp, Artificial Sequence
  Description of Artificial Sequence: Synthetic oligonucleotide
ttatattccaactcactcgcca

SEQ ID NO: 1411 - DNA, 22 bp, Artificial Sequence
  Description of Artificial Sequence: Synthetic oligonucleotide
tttccttcttgcatgctgtccc

SEQ ID NO: 1412 - DNA, 22 bp, Artificial Sequence
  Description of Artificial Sequence: Synthetic oligonucleotide
gtcatcaaatacacatagagct

SEQ ID NO: 1413 - DNA, 22 bp, Artificial Sequence
  Description of Artificial Sequence: Synthetic oligonucleotide
atttagagtggaacaatggcgt

SEQ ID NO: 1414 - DNA, 22 bp, Artificial Sequence
  Description of Artificial Sequence: Synthetic oligonucleotide
tttgaggtaacaatagtggccc

SEQ ID NO: 1415 - DNA, 22 bp, Artificial Sequence
  Description of Artificial Sequence: Synthetic oligonucleotide
atgagggtggatttccctaggc

SEQ ID NO: 1416 - DNA, 22 bp, Artificial Sequence
  Description of Artificial Sequence: Synthetic oligonucleotide
aagtaaagacacacgtggacgc

SEQ ID NO: 1417 - DNA, 22 bp, Artificial Sequence
  Description of Artificial Sequence: Synthetic oligonucleotide
ttatttcctctgagtctctggg

SEQ ID NO: 1418 - DNA, 22 bp, Artificial Sequence
  Description of Artificial Sequence: Synthetic oligonucleotide
attcagttgttcttccattcct

SEQ ID NO: 1419 - DNA, 22 bp, Artificial Sequence
  Description of Artificial Sequence: Synthetic oligonucleotide
ggaaatcaacactttcaatcgt

SEQ ID NO: 1420 - DNA, 22 bp, Artificial Sequence
  Description of Artificial Sequence: Synthetic oligonucleotide
aattgagttgttgatctgacct

SEQ ID NO: 1421 - DNA, 22 bp, Artificial Sequence
  Description of Artificial Sequence: Synthetic oligonucleotide
atatcttgtacttgggtgtcct

SEQ ID NO: 1422 - DNA, 22 bp, Artificial Sequence
  Description of Artificial Sequence: Synthetic oligonucleotide
tatatcatacatttcttcagct

SEQ ID NO: 1423 - DNA, 22 bp, Artificial Sequence
  Description of Artificial Sequence: Synthetic oligonucleotide
atatgtatcaaagtttcaagca

SEQ ID NO: 1424 - DNA, 22 bp, Artificial Sequence
  Description of Artificial Sequence: Synthetic oligonucleotide
atagggcttgagatttgttggt

SEQ ID NO: 1425 - DNA, 22 bp, Artificial Sequence
  Description of Artificial Sequence: Synthetic oligonucleotide
ttatctacaccaatacattgga

SEQ ID NO: 1426 - DNA, 22 bp, Artificial Sequence
  Description of Artificial Sequence: Synthetic oligonucleotide
atcagatcttcttgtaggaggc

SEQ ID NO: 1427 - DNA, 22 bp, Artificial Sequence
  Description of Artificial Sequence: Synthetic oligonucleotide
ttggtgtttaacctaatgggct

SEQ ID NO: 1428 - DNA, 22 bp, Artificial Sequence
  Description of Artificial Sequence: Synthetic oligonucleotide
ataagactcaatgtccagtcct

SEQ ID NO: 1429 - DNA, 22 bp, Artificial Sequence
  Description of Artificial Sequence: Synthetic oligonucleotide
atatacaaaggaacatggtggt

SEQ ID NO: 1430 - DNA, 22 bp, Artificial Sequence
  Description of Artificial Sequence: Synthetic oligonucleotide
taccaatagcaggtgaagggcg

SEQ ID NO: 1431 - DNA, 22 bp, Artificial Sequence
  Description of Artificial Sequence: Synthetic oligonucleotide
ataatcatagagaaccctggcc

SEQ ID NO: 1432 - DNA, 22 bp, Artificial Sequence
  Description of Artificial Sequence: Synthetic oligonucleotide
ttcatcaattggtatcaggcgt

SEQ ID NO: 1433 - DNA, 22 bp, Artificial Sequence
  Description of Artificial Sequence: Synthetic oligonucleotide
ataggaagagacatcccttggg

SEQ ID NO: 1434 - DNA, 22 bp, Artificial Sequence
  Description of Artificial Sequence: Synthetic oligonucleotide
tacattcatcacagttgctggg

SEQ ID NO: 1435 - DNA, 22 bp, Artificial Sequence
  Description of Artificial Sequence: Synthetic oligonucleotide
attatcctcccagacatgtgca

SEQ ID NO: 1436 - DNA, 22 bp, Artificial Sequence
  Description of Artificial Sequence: Synthetic oligonucleotide
tttctcatccagcattcggccc

SEQ ID NO: 1437 - DNA, 22 bp, Artificial Sequence
  Description of Artificial Sequence: Synthetic oligonucleotide
atttctctggcattcttctcgg

SEQ ID NO: 1438 - DNA, 22 bp, Artificial Sequence
  Description of Artificial Sequence: Synthetic oligonucleotide
atacaattgacttgctgctgca

SEQ ID NO: 1439 - DNA, 22 bp, Artificial Sequence
  Description of Artificial Sequence: Synthetic oligonucleotide
ttagagatgcttaccgtatgcc

SEQ ID NO: 1440 - DNA, 22 bp, Artificial Sequence
  Description of Artificial Sequence: Synthetic oligonucleotide
ttaagcatagaggacacttggc

SEQ ID NO: 1441 - DNA, 22 bp, Artificial Sequence
  Description of Artificial Sequence: Synthetic oligonucleotide
tttctgaaaggagatgggagct

SEQ ID NO: 1442 - DNA, 22 bp, Artificial Sequence
  Description of Artificial Sequence: Synthetic oligonucleotide
ttgggaatgaaatctgtcaccg

SEQ ID NO: 1443 - DNA, 22 bp, Artificial Sequence
  Description of Artificial Sequence: Synthetic oligonucleotide
tagatgacaaacactatggcca

SEQ ID NO: 1444 - DNA, 22 bp, Artificial Sequence
  Description of Artificial Sequence: Synthetic oligonucleotide
ttaacatcaaatggacagggcc

SEQ ID NO: 1445 - DNA, 22 bp, Artificial Sequence
  Description of Artificial Sequence: Synthetic oligonucleotide
tagaattataaccatcttgcct

SEQ ID NO: 1446 - DNA, 22 bp, Artificial Sequence
  Description of Artificial Sequence: Synthetic oligonucleotide
ataggtcatgaagtgaatggct

SEQ ID NO: 1447 - DNA, 22 bp, Artificial Sequence
  Description of Artificial Sequence: Synthetic oligonucleotide
taaatatccgtgtctggcacct

SEQ ID NO: 1448 - DNA, 22 bp, Artificial Sequence
  Description of Artificial Sequence: Synthetic oligonucleotide
attgagtatgagattgtgggca

SEQ ID NO: 1449 - DNA, 22 bp, Artificial Sequence
  Description of Artificial Sequence: Synthetic oligonucleotide
atggtaagtgagcgtaagggcc

SEQ ID NO: 1450 - DNA, 22 bp, Artificial Sequence
  Description of Artificial Sequence: Synthetic oligonucleotide
atagttggcacaaggatgacca

SEQ ID NO: 1451 - DNA, 22 bp, Artificial Sequence
  Description of Artificial Sequence: Synthetic oligonucleotide
aatgtagagaaatgcctcaggc

SEQ ID NO: 1452 - DNA, 22 bp, Artificial Sequence
  Description of Artificial Sequence: Synthetic oligonucleotide
ttgagggatgagattcgtacca

SEQ ID NO: 1453 - DNA, 22 bp, Artificial Sequence
  Description of Artificial Sequence: Synthetic oligonucleotide
ttcaggatgagcactttgagct

SEQ ID NO: 1454 - DNA, 22 bp, Artificial Sequence
  Description of Artificial Sequence: Synthetic oligonucleotide
ttggagaattagcctgttccac

SEQ ID NO: 1455 - DNA, 22 bp, Artificial Sequence
  Description of Artificial Sequence: Synthetic oligonucleotide
atctcatttataatacactcct

SEQ ID NO: 1456 - DNA, 22 bp, Artificial Sequence
  Description of Artificial Sequence: Synthetic oligonucleotide
tttcaacttaatactaagtgca

SEQ ID NO: 1457 - DNA, 22 bp, Artificial Sequence
  Description of Artificial Sequence: Synthetic oligonucleotide
attagctacttcacagattggg

SEQ ID NO: 1458 - DNA, 22 bp, Artificial Sequence
  Description of Artificial Sequence: Synthetic oligonucleotide
aatttctatgtcgttgtgacct

SEQ ID NO: 1459 - DNA, 22 bp, Artificial Sequence
  Description of Artificial Sequence: Synthetic oligonucleotide
taaatgataaagaagaacagca

SEQ ID NO: 1460 - DNA, 22 bp, Artificial Sequence
  Description of Artificial Sequence: Synthetic oligonucleotide
ttccttgttgaaatgcagccgt

SEQ ID NO: 1461 - DNA, 22 bp, Artificial Sequence
  Description of Artificial Sequence: Synthetic oligonucleotide
tagaaacaatgcaagctgggca

SEQ ID NO: 1462 - DNA, 22 bp, Artificial Sequence
  Description of Artificial Sequence: Synthetic oligonucleotide
tttgagagggatgatcttcctg

SEQ ID NO: 1463 - DNA, 22 bp, Artificial Sequence
  Description of Artificial Sequence: Synthetic oligonucleotide
tagaatcggaaatcagtctggc

SEQ ID NO: 1464 - DNA, 22 bp, Artificial Sequence
  Description of Artificial Sequence: Synthetic oligonucleotide
tttactgggcctataaatactc

SEQ ID NO: 1465 - DNA, 22 bp, Artificial Sequence
  Description of Artificial Sequence: Synthetic oligonucleotide
taaggcaaacttgtgaattgct

SEQ ID NO: 1466 - DNA, 22 bp, Artificial Sequence
  Description of Artificial Sequence: Synthetic oligonucleotide
tttcttcaaaccatgcatccga

SEQ ID NO: 1467 - DNA, 22 bp, Artificial Sequence
  Description of Artificial Sequence: Synthetic oligonucleotide
gtatagcatgatattcttgtct

SEQ ID NO: 1468 - DNA, 22 bp, Artificial Sequence
  Description of Artificial Sequence: Synthetic oligonucleotide
ataggttggcctacaatttgca

SEQ ID NO: 1469 - DNA, 22 bp, Artificial Sequence
  Description of Artificial Sequence: Synthetic oligonucleotide
tttagttctcggataggaccca

SEQ ID NO: 1470 - DNA, 22 bp, Artificial Sequence
  Description of Artificial Sequence: Synthetic oligonucleotide
taaatgcctgatatatgcccga

SEQ ID NO: 1471 - DNA, 22 bp, Artificial Sequence
  Description of Artificial Sequence: Synthetic oligonucleotide
tttgaaatggatctgaccacgg

SEQ ID NO: 1472 - DNA, 22 bp, Artificial Sequence
  Description of Artificial Sequence: Synthetic oligonucleotide
ttattgtgtaacttgacagccc

SEQ ID NO: 1473 - DNA, 22 bp, Artificial Sequence
  Description of Artificial Sequence: Synthetic oligonucleotide
taatggttcaaggaagctgcca

SEQ ID NO: 1474 - DNA, 22 bp, Artificial Sequence
  Description of Artificial Sequence: Synthetic oligonucleotide
tactgagagcagtttggcgttc

SEQ ID NO: 1475 - DNA, 22 bp, Artificial Sequence
  Description of Artificial Sequence: Synthetic oligonucleotide
ttctcatagaaggtgcagttcc

SEQ ID NO: 1476 - DNA, 22 bp, Artificial Sequence
  Description of Artificial Sequence: Synthetic oligonucleotide
atagtcaatcacgttctgggcc

SEQ ID NO: 1477 - DNA, 22 bp, Artificial Sequence
  Description of Artificial Sequence: Synthetic oligonucleotide
taaggaaactctcccggagggc

SEQ ID NO: 1478 - DNA, 22 bp, Artificial Sequence
  Description of Artificial Sequence: Synthetic oligonucleotide
tttgctttcaactttgggaggt

SEQ ID NO: 1479 - DNA, 22 bp, Artificial Sequence
  Description of Artificial Sequence: Synthetic oligonucleotide
tatcggtaggagatcttctcgt

SEQ ID NO: 1480 - DNA, 22 bp, Artificial Sequence
  Description of Artificial Sequence: Synthetic oligonucleotide
ttgttcttacaaatggagggca

SEQ ID NO: 1481 - DNA, 22 bp, Artificial Sequence
  Description of Artificial Sequence: Synthetic oligonucleotide
atattgataacaggtacaggct

SEQ ID NO: 1482 - DNA, 22 bp, Artificial Sequence
  Description of Artificial Sequence: Synthetic oligonucleotide
atatcttcagatactttctgct

SEQ ID NO: 1483 - DNA, 22 bp, Artificial Sequence
  Description of Artificial Sequence: Synthetic oligonucleotide
ttcaccaaggactctatagctc

SEQ ID NO: 1484 - DNA, 22 bp, Artificial Sequence
  Description of Artificial Sequence: Synthetic oligonucleotide
atgttggctgacttgatgacct

SEQ ID NO: 1485 - DNA, 22 bp, Artificial Sequence
  Description of Artificial Sequence: Synthetic oligonucleotide
tttagcatagcattcaatacct

SEQ ID NO: 1486 - DNA, 22 bp, Artificial Sequence
  Description of Artificial Sequence: Synthetic oligonucleotide
atcaatgagctggacaatggtc

SEQ ID NO: 1487 - DNA, 22 bp, Artificial Sequence
  Description of Artificial Sequence: Synthetic oligonucleotide
atgacaaaccaggctcttgcat

SEQ ID NO: 1488 - DNA, 22 bp, Artificial Sequence
  Description of Artificial Sequence: Synthetic oligonucleotide
attgaactggagaaactgaggc

SEQ ID NO: 1489 - DNA, 22 bp, Artificial Sequence
  Description of Artificial Sequence: Synthetic oligonucleotide
tttgatacacaaattccatgcc

SEQ ID NO: 1490 - DNA, 22 bp, Artificial Sequence
  Description of Artificial Sequence: Synthetic oligonucleotide
aatcatgtccatagtttcagcc

SEQ ID NO: 1491 - DNA, 22 bp, Artificial Sequence
  Description of Artificial Sequence: Synthetic oligonucleotide
atagtaagtaagaggctctcgt

SEQ ID NO: 1492 - DNA, 22 bp, Artificial Sequence
  Description of Artificial Sequence: Synthetic oligonucleotide
atctggaaaggcactgaggttc

SEQ ID NO: 1493 - DNA, 22 bp, Artificial Sequence
  Description of Artificial Sequence: Synthetic oligonucleotide
tttccgatcttctgcaggacct

SEQ ID NO: 1494 - DNA, 22 bp, Artificial Sequence
  Description of Artificial Sequence: Synthetic oligonucleotide
atttattacggttatcttcgct

SEQ ID NO: 1495 - DNA, 22 bp, Artificial Sequence
  Description of Artificial Sequence: Synthetic oligonucleotide
ttcatatttccttcgtagcgct

SEQ ID NO: 1496 - DNA, 22 bp, Artificial Sequence
  Description of Artificial Sequence: Synthetic oligonucleotide
tttaatctccatattcttggct

SEQ ID NO: 1497 - DNA, 22 bp, Artificial Sequence
  Description of Artificial Sequence: Synthetic oligonucleotide
catcttcttgagtaacagctgt

SEQ ID NO: 1498 - DNA, 22 bp, Artificial Sequence
  Description of Artificial Sequence: Synthetic oligonucleotide
tttggatacagatacttcaggg

SEQ ID NO: 1499 - DNA, 22 bp, Artificial Sequence
  Description of Artificial Sequence: Synthetic oligonucleotide
ttaagagtccaattagaaacac

SEQ ID NO: 1500 - DNA, 22 bp, Artificial Sequence
  Description of Artificial Sequence: Synthetic oligonucleotide
tgaatgatccaccttgtctcat

SEQ ID NO: 1501 - DNA, 22 bp, Artificial Sequence
  Description of Artificial Sequence: Synthetic oligonucleotide
ttatttggaagcttcttgtggt

SEQ ID NO: 1502 - DNA, 22 bp, Artificial Sequence
  Description of Artificial Sequence: Synthetic oligonucleotide
ttagcataagagggatccagca

SEQ ID NO: 1503 - DNA, 22 bp, Artificial Sequence
  Description of Artificial Sequence: Synthetic oligonucleotide
ttctggagcctcttggtcaggc

SEQ ID NO: 1504 - DNA, 22 bp, Artificial Sequence
  Description of Artificial Sequence: Synthetic oligonucleotide
tttaggaagaagatcagtcggt

SEQ ID NO: 1505 - DNA, 22 bp, Artificial Sequence
  Description of Artificial Sequence: Synthetic oligonucleotide
atcattcataaacctccggcag

SEQ ID NO: 1506 - DNA, 22 bp, Artificial Sequence
  Description of Artificial Sequence: Synthetic oligonucleotide
ttagggtttcgaaatatcacca

SEQ ID NO: 1507 - DNA, 22 bp, Artificial Sequence
  Description of Artificial Sequence: Synthetic oligonucleotide
ttaagtacacatatactaagct

SEQ ID NO: 1508 - DNA, 22 bp, Artificial Sequence
  Description of Artificial Sequence: Synthetic oligonucleotide
tattgataacaggagcaggcgc

SEQ ID NO: 1509 - DNA, 22 bp, Artificial Sequence
  Description of Artificial Sequence: Synthetic oligonucleotide
taagattaaagtcatgcatgct

SEQ ID NO: 1510 - DNA, 22 bp, Artificial Sequence
  Description of Artificial Sequence: Synthetic oligonucleotide
tttaagcatgggtttgactggc

SEQ ID NO: 1511 - DNA, 22 bp, Artificial Sequence
  Description of Artificial Sequence: Synthetic oligonucleotide
atgggacagcaagggaagaggg

SEQ ID NO: 1512 - DNA, 22 bp, Artificial Sequence
  Description of Artificial Sequence: Synthetic oligonucleotide
atacagtctaaaccgaactgca

SEQ ID NO: 1513 - DNA, 22 bp, Artificial Sequence
  Description of Artificial Sequence: Synthetic oligonucleotide
atgtatcccgatgccaaatgga

SEQ ID NO: 1514 - DNA, 22 bp, Artificial Sequence
  Description of Artificial Sequence: Synthetic oligonucleotide
ataaatcttgagacagcgtcca

SEQ ID NO: 1515 - DNA, 22 bp, Artificial Sequence
  Description of Artificial Sequence: Synthetic oligonucleotide
aaccctttacaaatcctgctaa

SEQ ID NO: 1516 - DNA, 22 bp, Artificial Sequence
  Description of Artificial Sequence: Synthetic oligonucleotide
aacagtcatcagtatggtcggt

SEQ ID NO: 1517 - DNA, 22 bp, Artificial Sequence
  Description of Artificial Sequence: Synthetic oligonucleotide
tatcccaaagaagcactctgcc

SEQ ID NO: 1518 - DNA, 22 bp, Artificial Sequence
  Description of Artificial Sequence: Synthetic oligonucleotide
atagaagtaaagctcccggccc

SEQ ID NO: 1519 - DNA, 22 bp, Artificial Sequence
  Description of Artificial Sequence: Synthetic oligonucleotide
atatttgtgaagtgacactcgt

SEQ ID NO: 1520 - DNA, 22 bp, Artificial Sequence
  Description of Artificial Sequence: Synthetic oligonucleotide
tttagacttcaaactcttaggc

SEQ ID NO: 1521 - DNA, 22 bp, Artificial Sequence
  Description of Artificial Sequence: Synthetic oligonucleotide
ttatagcgacagacttcatgct

SEQ ID NO: 1522 - DNA, 22 bp, Artificial Sequence
  Description of Artificial Sequence: Synthetic oligonucleotide
atagattagcacttaccaggcc

SEQ ID NO: 1523 - DNA, 22 bp, Artificial Sequence
  Description of Artificial Sequence: Synthetic oligonucleotide
tttaaggtggaattgctcagct

SEQ ID NO: 1524 - DNA, 22 bp, Artificial Sequence
  Description of Artificial Sequence: Synthetic oligonucleotide
taaacctgtgagaacctgctgg

SEQ ID NO: 1525 - DNA, 22 bp, Artificial Sequence
  Description of Artificial Sequence: Synthetic oligonucleotide
atttgtcccaaagctccttggt

SEQ ID NO: 1526 - DNA, 22 bp, Artificial Sequence
  Description of Artificial Sequence: Synthetic oligonucleotide
ttaagtactcggatgcattgct

SEQ ID NO: 1527 - DNA, 22 bp, Artificial Sequence
  Description of Artificial Sequence: Synthetic oligonucleotide
ttgctgaataaccttaactcca

SEQ ID NO: 1528 - DNA, 22 bp, Artificial Sequence
  Description of Artificial Sequence: Synthetic oligonucleotide
tttgataatccttggagttcct

SEQ ID NO: 1529 - DNA, 22 bp, Artificial Sequence
  Description of Artificial Sequence: Synthetic oligonucleotide
tagttccaacccatggtgggca

SEQ ID NO: 1530 - DNA, 22 bp, Artificial Sequence
  Description of Artificial Sequence: Synthetic oligonucleotide
attccactcgaaattcatgccg

SEQ ID NO: 1531 - DNA, 22 bp, Artificial Sequence
  Description of Artificial Sequence: Synthetic oligonucleotide
ttgtgaattgactctctcagtc

SEQ ID NO: 1532 - DNA, 22 bp, Artificial Sequence
  Description of Artificial Sequence: Synthetic oligonucleotide
tttgtttcagagagatcgtgct

SEQ ID NO: 1533 - DNA, 22 bp, Artificial Sequence
  Description of Artificial Sequence: Synthetic oligonucleotide
atatggcacaggaaaggtggcc

SEQ ID NO: 1534 - DNA, 22 bp, Artificial Sequence
  Description of Artificial Sequence: Synthetic oligonucleotide
tatagccctagttatagcaggt

SEQ ID NO: 1535 - DNA, 22 bp, Artificial Sequence
  Description of Artificial Sequence: Synthetic oligonucleotide
ttcaacttggactggatttccc

SEQ ID NO: 1536 - DNA, 22 bp, Artificial Sequence
  Description of Artificial Sequence: Synthetic oligonucleotide
taaagaggagacacatcgagcc

SEQ ID NO: 1537 - DNA, 22 bp, Artificial Sequence
  Description of Artificial Sequence: Synthetic oligonucleotide
gtaattggtctaataattccct

SEQ ID NO: 1538 - DNA, 22 bp, Artificial Sequence
  Description of Artificial Sequence: Synthetic oligonucleotide
taagtccatccaagagggcctg

SEQ ID NO: 1539 - DNA, 22 bp, Artificial Sequence
  Description of Artificial Sequence: Synthetic oligonucleotide
taaactgattagggtctttgcc

SEQ ID NO: 1540 - DNA, 22 bp, Artificial Sequence
  Description of Artificial Sequence: Synthetic oligonucleotide
aattatgctgatactcaactgt

SEQ ID NO: 1541 - DNA, 22 bp, Artificial Sequence
  Description of Artificial Sequence: Synthetic oligonucleotide
atagcaagagaaataatagcta

SEQ ID NO: 1542 - DNA, 22 bp, Artificial Sequence
  Description of Artificial Sequence: Synthetic oligonucleotide
taatgtctcatgcctgtctgga

SEQ ID NO: 1543 - DNA, 22 bp, Artificial Sequence
  Description of Artificial Sequence: Synthetic oligonucleotide
atctagaaccaagtccatggcc

SEQ ID NO: 1544 - DNA, 22 bp, Artificial Sequence
  Description of Artificial Sequence: Synthetic oligonucleotide
tatttccttgtcacctcctggg

SEQ ID NO: 1545 - DNA, 22 bp, Artificial Sequence
  Description of Artificial Sequence: Synthetic oligonucleotide
ttgaactgtaaggtgtgtggcg

SEQ ID NO: 1546 - DNA, 22 bp, Artificial Sequence
  Description of Artificial Sequence: Synthetic oligonucleotide
aacaagtctcaggattggtccg

SEQ ID NO: 1547 - DNA, 22 bp, Artificial Sequence
  Description of Artificial Sequence: Synthetic oligonucleotide
ttactgaataatcttgctgtct

SEQ ID NO: 1548 - DNA, 22 bp, Artificial Sequence
  Description of Artificial Sequence: Synthetic oligonucleotide
atagactttctcaacatttgct

SEQ ID NO: 1549 - DNA, 22 bp, Artificial Sequence
  Description of Artificial Sequence: Synthetic oligonucleotide
tagtaatagccctccaaaggca

SEQ ID NO: 1550 - DNA, 22 bp, Artificial Sequence
  Description of Artificial Sequence: Synthetic oligonucleotide
taacaggattccaggtccagtt

SEQ ID NO: 1551 - DNA, 22 bp, Artificial Sequence
  Description of Artificial Sequence: Synthetic oligonucleotide
tttattcttcacatcatgtgcc

SEQ ID NO: 1552 - DNA, 22 bp, Artificial Sequence
  Description of Artificial Sequence: Synthetic oligonucleotide
atagtctgtaatgatatatgct

SEQ ID NO: 1553 - DNA, 22 bp, Artificial Sequence
  Description of Artificial Sequence: Synthetic oligonucleotide
taagatgttccctttgtgtggt

SEQ ID NO: 1554 - DNA, 22 bp, Artificial Sequence
  Description of Artificial Sequence: Synthetic oligonucleotide
aatacatggaaattgttgtgct

SEQ ID NO: 1555 - DNA, 22 bp, Artificial Sequence
  Description of Artificial Sequence: Synthetic oligonucleotide
tttgccctaaaggaagtgaggg

SEQ ID NO: 1556 - DNA, 22 bp, Artificial Sequence
  Description of Artificial Sequence: Synthetic oligonucleotide
ttggaatttcagagtgagagca

SEQ ID NO: 1557 - DNA, 22 bp, Artificial Sequence
  Description of Artificial Sequence: Synthetic oligonucleotide
tagggtaaatgtttgattcgga

SEQ ID NO: 1558 - DNA, 22 bp, Artificial Sequence
  Description of Artificial Sequence: Synthetic oligonucleotide
tatcttatcaggcagccgggct

SEQ ID NO: 1559 - DNA, 22 bp, Artificial Sequence
  Description of Artificial Sequence: Synthetic oligonucleotide
atgtatacccaaagtttaaccc

SEQ ID NO: 1560 - DNA, 22 bp, Artificial Sequence
  Description of Artificial Sequence: Synthetic oligonucleotide
aatgagacaataataatcaggt

SEQ ID NO: 1561 - DNA, 22 bp, Artificial Sequence
  Description of Artificial Sequence: Synthetic oligonucleotide
tttaacaagcatgttctccctc

SEQ ID NO: 1562 - DNA, 22 bp, Artificial Sequence
  Description of Artificial Sequence: Synthetic oligonucleotide
ataaatgagtgcatgagttgct

SEQ ID NO: 1563 - DNA, 22 bp, Artificial Sequence
  Description of Artificial Sequence: Synthetic oligonucleotide
ttagggttgcaccaaagaaggt

SEQ ID NO: 1564 - DNA, 22 bp, Artificial Sequence
  Description of Artificial Sequence: Synthetic oligonucleotide
ttcctccgtagggtatgcaggt

SEQ ID NO: 1565 - DNA, 22 bp, Artificial Sequence
  Description of Artificial Sequence: Synthetic oligonucleotide
tagtaggtggtcatgatcacca

SEQ ID NO: 1566 - DNA, 22 bp, Artificial Sequence
  Description of Artificial Sequence: Synthetic oligonucleotide
ttcttgctggagatgcattccc

SEQ ID NO: 1567 - DNA, 22 bp, Artificial Sequence
  Description of Artificial Sequence: Synthetic oligonucleotide
aggaaataccagagtagcaccc

SEQ ID NO: 1568 - DNA, 22 bp, Artificial Sequence
  Description of Artificial Sequence: Synthetic oligonucleotide
attgccctgaatatgagatggt

SEQ ID NO: 1569 - DNA, 22 bp, Artificial Sequence
  Description of Artificial Sequence: Synthetic oligonucleotide
taaatgaagtagagacagccca

SEQ ID NO: 1570 - DNA, 22 bp, Artificial Sequence
  Description of Artificial Sequence: Synthetic oligonucleotide
ttaggtctttgttctgacgctt

SEQ ID NO: 1571 - DNA, 22 bp, Artificial Sequence
  Description of Artificial Sequence: Synthetic oligonucleotide
ttgacctatggcactgactgga

SEQ ID NO: 1572 - DNA, 22 bp, Artificial Sequence
  Description of Artificial Sequence: Synthetic oligonucleotide
tttattgctcctgtacgaaccc

SEQ ID NO: 1573 - DNA, 22 bp, Artificial Sequence
  Description of Artificial Sequence: Synthetic oligonucleotide
atacccagaacacattaagcct

SEQ ID NO: 1574 - DNA, 22 bp, Artificial Sequence
  Description of Artificial Sequence: Synthetic oligonucleotide
atttataccgaggagatgggaa

SEQ ID NO: 1575 - DNA, 22 bp, Artificial Sequence
  Description of Artificial Sequence: Synthetic oligonucleotide
atacatgtccacataactacga

SEQ ID NO: 1576 - DNA, 22 bp, Artificial Sequence
  Description of Artificial Sequence: Synthetic oligonucleotide
atggattagcacatagtctcca

SEQ ID NO: 1577 - DNA, 22 bp, Artificial Sequence
  Description of Artificial Sequence: Synthetic oligonucleotide
tttgagatactctctgcaagca

SEQ ID NO: 1578 - DNA, 22 bp, Artificial Sequence
  Description of Artificial Sequence: Synthetic oligonucleotide
atagttcacaaagtagtgggca

SEQ ID NO: 1579 - DNA, 22 bp, Artificial Sequence
  Description of Artificial Sequence: Synthetic oligonucleotide
tatttcttgcatggagatacgc

SEQ ID NO: 1580 - DNA, 22 bp, Artificial Sequence
  Description of Artificial Sequence: Synthetic oligonucleotide
aagtatcagccacggattggct

SEQ ID NO: 1581 - DNA, 22 bp, Artificial Sequence
  Description of Artificial Sequence: Synthetic oligonucleotide
ttgggttgtcctttcgtttgcc

SEQ ID NO: 1582 - DNA, 22 bp, Artificial Sequence
  Description of Artificial Sequence: Synthetic oligonucleotide
attagttacgaaggttaacgct

SEQ ID NO: 1583 - DNA, 22 bp, Artificial Sequence
  Description of Artificial Sequence: Synthetic oligonucleotide
ttccttcaactctagctcagca

SEQ ID NO: 1584 - DNA, 22 bp, Artificial Sequence
  Description of Artificial Sequence: Synthetic oligonucleotide
aattcagaacacatggaatggg

SEQ ID NO: 1585 - DNA, 22 bp, Artificial Sequence
  Description of Artificial Sequence: Synthetic oligonucleotide
atgtctggagggcttcagtggc

SEQ ID NO: 1586 - DNA, 22 bp, Artificial Sequence
  Description of Artificial Sequence: Synthetic oligonucleotide
taagtacttcctgggcatagcc

SEQ ID NO: 1587 - DNA, 22 bp, Artificial Sequence
  Description of Artificial Sequence: Synthetic oligonucleotide
attagttataccactgtcaccg

SEQ ID NO: 1588 - DNA, 22 bp, Artificial Sequence
  Description of Artificial Sequence: Synthetic oligonucleotide
ttaactataaataagccaaggt

SEQ ID NO: 1589 - DNA, 22 bp, Artificial Sequence
  Description of Artificial Sequence: Synthetic oligonucleotide
ttcttgcttgtcattgttgccg

SEQ ID NO: 1590 - DNA, 22 bp, Artificial Sequence
  Description of Artificial Sequence: Synthetic oligonucleotide
atcccgtgtcatacaatatcca

SEQ ID NO: 1591 - DNA, 22 bp, Artificial Sequence
  Description of Artificial Sequence: Synthetic oligonucleotide
tttggtcagtactgagtgtggg

SEQ ID NO: 1592 - DNA, 22 bp, Artificial Sequence
  Description of Artificial Sequence: Synthetic oligonucleotide
ttgcaacctgtcctagagtgcc

SEQ ID NO: 1593 - DNA, 22 bp, Artificial Sequence
  Description of Artificial Sequence: Synthetic oligonucleotide
ttacacccactggaaataaccc

SEQ ID NO: 1594 - DNA, 22 bp, Artificial Sequence
  Description of Artificial Sequence: Synthetic oligonucleotide
tttatggatcttgcccagagct

SEQ ID NO: 1595 - DNA, 22 bp, Artificial Sequence
  Description of Artificial Sequence: Synthetic oligonucleotide
taacagctataaatccattgct

SEQ ID NO: 1596 - DNA, 22 bp, Artificial Sequence
  Description of Artificial Sequence: Synthetic oligonucleotide
tttaataagagctcagccaggt

SEQ ID NO: 1597 - DNA, 22 bp, Artificial Sequence
  Description of Artificial Sequence: Synthetic oligonucleotide
tttgaaatagaggacatgggct

SEQ ID NO: 1598 - DNA, 22 bp, Artificial Sequence
  Description of Artificial Sequence: Synthetic oligonucleotide
ttatttggtgttggatccagga

SEQ ID NO: 1599 - DNA, 22 bp, Artificial Sequence
  Description of Artificial Sequence: Synthetic oligonucleotide
tttgggacatagagtgtgagca

SEQ ID NO: 1600 - DNA, 22 bp, Artificial Sequence
  Description of Artificial Sequence: Synthetic oligonucleotide
ttattctccagtgtacatccca

SEQ ID NO: 1601 - DNA, 22 bp, Artificial Sequence
  Description of Artificial Sequence: Synthetic oligonucleotide
ttaggtctacattcaagggccc

SEQ ID NO: 1602 - DNA, 22 bp, Artificial Sequence
  Description of Artificial Sequence: Synthetic oligonucleotide
ttgctagatcgaatgctgtcca

SEQ ID NO: 1603 - DNA, 22 bp, Artificial Sequence
  Description of Artificial Sequence: Synthetic oligonucleotide
tttagcaagtccattaagtgcc

SEQ ID NO: 1604 - DNA, 22 bp, Artificial Sequence
  Description of Artificial Sequence: Synthetic oligonucleotide
ttattgagaacatccaacaggt

SEQ ID NO: 1605 - DNA, 22 bp, Artificial Sequence
  Description of Artificial Sequence: Synthetic oligonucleotide
ataggataaaggattgagccag

SEQ ID NO: 1606 - DNA, 22 bp, Artificial Sequence
  Description of Artificial Sequence: Synthetic oligonucleotide
taatgaaatatttgtacagggc

SEQ ID NO: 1607 - DNA, 22 bp, Artificial Sequence
  Description of Artificial Sequence: Synthetic oligonucleotide
atgaatgcatttagacaccgga

SEQ ID NO: 1608 - DNA, 22 bp, Artificial Sequence
  Description of Artificial Sequence: Synthetic oligonucleotide
ttatcaattccatctcagaggt

SEQ ID NO: 1609 - DNA, 22 bp, Artificial Sequence
  Description of Artificial Sequence: Synthetic oligonucleotide
ttacggtaaatgttcaagaggg

SEQ ID NO: 1610 - DNA, 22 bp, Artificial Sequence
  Description of Artificial Sequence: Synthetic oligonucleotide
ttatctcatgactggttatgca

SEQ ID NO: 1611 - DNA, 22 bp, Artificial Sequence
  Description of Artificial Sequence: Synthetic oligonucleotide
ttatctaaagcattcataacca

SEQ ID NO: 1612 - DNA, 22 bp, Artificial Sequence
  Description of Artificial Sequence: Synthetic oligonucleotide
tttgaccttcttcttgggacgc

SEQ ID NO: 1613 - DNA, 22 bp, Artificial Sequence
  Description of Artificial Sequence: Synthetic oligonucleotide
aactgagagaacatcagctgcc

SEQ ID NO: 1614 - DNA, 22 bp, Artificial Sequence
  Description of Artificial Sequence: Synthetic oligonucleotide
attgctccaagaactgggagcc

SEQ ID NO: 1615 - DNA, 22 bp, Artificial Sequence
  Description of Artificial Sequence: Synthetic oligonucleotide
attctcaatggtgtcactcggc

SEQ ID NO: 1616 - DNA, 22 bp, Artificial Sequence
  Description of Artificial Sequence: Synthetic oligonucleotide
tttaaagctaatcttcttaggt

SEQ ID NO: 1617 - DNA, 22 bp, Artificial Sequence
  Description of Artificial Sequence: Synthetic oligonucleotide
taaggctaccagttctgctgca

SEQ ID NO: 1618 - DNA, 22 bp, Artificial Sequence
  Description of Artificial Sequence: Synthetic oligonucleotide
ttatatattaggacaatcaggt

SEQ ID NO: 1619 - DNA, 22 bp, Artificial Sequence
  Description of Artificial Sequence: Synthetic oligonucleotide
ttgagtgttcaaattcagggca

SEQ ID NO: 1620 - DNA, 22 bp, Artificial Sequence
  Description of Artificial Sequence: Synthetic oligonucleotide
tactgcaataatcagaagggct

SEQ ID NO: 1621 - DNA, 22 bp, Artificial Sequence
  Description of Artificial Sequence: Synthetic oligonucleotide
tacgtttaagagtctctctccc

SEQ ID NO: 1622 - DNA, 22 bp, Artificial Sequence
  Description of Artificial Sequence: Synthetic oligonucleotide
tacaatgatagattcttgtccg

SEQ ID NO: 1623 - DNA, 22 bp, Artificial Sequence
  Description of Artificial Sequence: Synthetic oligonucleotide
tataaacacaaaggaagtggcg

SEQ ID NO: 1624 - DNA, 22 bp, Artificial Sequence
  Description of Artificial Sequence: Synthetic oligonucleotide
atttagaagttcctgtattcct

SEQ ID NO: 1625 - DNA, 22 bp, Artificial Sequence
  Description of Artificial Sequence: Synthetic oligonucleotide
ttggcagtaaatcgtgtaggcc

SEQ ID NO: 1626 - DNA, 22 bp, Artificial Sequence
  Description of Artificial Sequence: Synthetic oligonucleotide
attcatttcccatcgctgagtg

SEQ ID NO: 1627 - DNA, 22 bp, Artificial Sequence
  Description of Artificial Sequence: Synthetic oligonucleotide
tttatgtccttctggatccgca

SEQ ID NO: 1628 - DNA, 22 bp, Artificial Sequence
  Description of Artificial Sequence: Synthetic oligonucleotide
ttaagttcttgatggacaaggg

SEQ ID NO: 1629 - DNA, 22 bp, Artificial Sequence
  Description of Artificial Sequence: Synthetic oligonucleotide
ttgagcctgcagtttgtaagcg

SEQ ID NO: 1630 - DNA, 22 bp, Artificial Sequence
  Description of Artificial Sequence: Synthetic oligonucleotide
ttgatgcagtattccgccaggg

SEQ ID NO: 1631 - DNA, 22 bp, Artificial Sequence
  Description of Artificial Sequence: Synthetic oligonucleotide
atatgcgccttgaagtagccgc

SEQ ID NO: 1632 - DNA, 22 bp, Artificial Sequence
  Description of Artificial Sequence: Synthetic oligonucleotide
ggtagtaatcactaaatgaggt

SEQ ID NO: 1633 - DNA, 22 bp, Artificial Sequence
  Description of Artificial Sequence: Synthetic oligonucleotide
atactcaagcagactttcccat

SEQ ID NO: 1634 - DNA, 22 bp, Artificial Sequence
  Description of Artificial Sequence: Synthetic oligonucleotide
ttaggatgggatccatcttccc

SEQ ID NO: 1635 - DNA, 22 bp, Artificial Sequence
  Description of Artificial Sequence: Synthetic oligonucleotide
aatgaactgctggttgggtcca

SEQ ID NO: 1636 - DNA, 22 bp, Artificial Sequence
  Description of Artificial Sequence: Synthetic oligonucleotide
atatagtctctcatgatctcct

SEQ ID NO: 1637 - DNA, 22 bp, Artificial Sequence
  Description of Artificial Sequence: Synthetic oligonucleotide
tttggaactaaccttctgagct

SEQ ID NO: 1638 - DNA, 22 bp, Artificial Sequence
  Description of Artificial Sequence: Synthetic oligonucleotide
attgccaaacgtgcactgagcc

SEQ ID NO: 1639 - DNA, 22 bp, Artificial Sequence
  Description of Artificial Sequence: Synthetic oligonucleotide
taaacatacttcaaacacagca

SEQ ID NO: 1640 - DNA, 22 bp, Artificial Sequence
  Description of Artificial Sequence: Synthetic oligonucleotide
tagtggtagtagaggtagtggc

SEQ ID NO: 1641 - DNA, 22 bp, Artificial Sequence
  Description of Artificial Sequence: Synthetic oligonucleotide
atactttgcaacttcatatcct

SEQ ID NO: 1642 - DNA, 22 bp, Artificial Sequence
  Description of Artificial Sequence: Synthetic oligonucleotide
atatagaagggtattaactgcc

SEQ ID NO: 1643 - DNA, 22 bp, Artificial Sequence
  Description of Artificial Sequence: Synthetic oligonucleotide
tatcatccacatggaacaaccc

SEQ ID NO: 1644 - DNA, 22 bp, Artificial Sequence
  Description of Artificial Sequence: Synthetic oligonucleotide
tttcaccaccttataaatgcca

SEQ ID NO: 1645 - DNA, 22 bp, Artificial Sequence
  Description of Artificial Sequence: Synthetic oligonucleotide
tatgttaggtataactgctggt

SEQ ID NO: 1646 - DNA, 22 bp, Artificial Sequence
  Description of Artificial Sequence: Synthetic oligonucleotide
tttataggcccttaaagctgct

SEQ ID NO: 1647 - DNA, 22 bp, Artificial Sequence
  Description of Artificial Sequence: Synthetic oligonucleotide
tagtctccacatttgaacagct

SEQ ID NO: 1648 - DNA, 22 bp, Artificial Sequence
  Description of Artificial Sequence: Synthetic oligonucleotide
atattcacattgctaagatgca

SEQ ID NO: 1649 - DNA, 22 bp, Artificial Sequence
  Description of Artificial Sequence: Synthetic oligonucleotide
atagctctgaacaacacatggg

SEQ ID NO: 1650 - DNA, 22 bp, Artificial Sequence
  Description of Artificial Sequence: Synthetic oligonucleotide
atatgttctggtactggtaggc

SEQ ID NO: 1651 - DNA, 22 bp, Artificial Sequence
  Description of Artificial Sequence: Synthetic oligonucleotide
ttcagctttcatttggaaggca

SEQ ID NO: 1652 - DNA, 22 bp, Artificial Sequence
  Description of Artificial Sequence: Synthetic oligonucleotide
tttagggttgtgttgactaggt

SEQ ID NO: 1653 - DNA, 22 bp, Artificial Sequence
  Description of Artificial Sequence: Synthetic oligonucleotide
tttcagaaggcttgtgtgaggc

SEQ ID NO: 1654 - DNA, 22 bp, Artificial Sequence
  Description of Artificial Sequence: Synthetic oligonucleotide
ttagatatggaggcaacttggt

SEQ ID NO: 1655 - DNA, 22 bp, Artificial Sequence
  Description of Artificial Sequence: Synthetic oligonucleotide
aattcataccatttgcctgtcc

SEQ ID NO: 1656 - DNA, 22 bp, Artificial Sequence
  Description of Artificial Sequence: Synthetic oligonucleotide
ttgcttctttatatgacctgcc

SEQ ID NO: 1657 - DNA, 22 bp, Artificial Sequence
  Description of Artificial Sequence: Synthetic oligonucleotide
aatattggtttgggtaggtccc

SEQ ID NO: 1658 - DNA, 22 bp, Artificial Sequence
  Description of Artificial Sequence: Synthetic oligonucleotide
ataatcattgaacttgattgca

SEQ ID NO: 1659 - DNA, 22 bp, Artificial Sequence
  Description of Artificial Sequence: Synthetic oligonucleotide
ttaagaggtggcatattcaggt

SEQ ID NO: 1660 - DNA, 22 bp, Artificial Sequence
  Description of Artificial Sequence: Synthetic oligonucleotide
ttattaagtgatttagagccca

SEQ ID NO: 1661 - DNA, 22 bp, Artificial Sequence
  Description of Artificial Sequence: Synthetic oligonucleotide
tttggcaaatccgctagttctt

SEQ ID NO: 1662 - DNA, 22 bp, Artificial Sequence
  Description of Artificial Sequence: Synthetic oligonucleotide
tttaataaaggttcgatatgca

SEQ ID NO: 1663 - DNA, 22 bp, Artificial Sequence
  Description of Artificial Sequence: Synthetic oligonucleotide
ttaagaacatgactgatttcct

SEQ ID NO: 1664 - DNA, 22 bp, Artificial Sequence
  Description of Artificial Sequence: Synthetic oligonucleotide
ggtacataacatccagacagct

SEQ ID NO: 1665 - DNA, 22 bp, Artificial Sequence
  Description of Artificial Sequence: Synthetic oligonucleotide
tttgagcacaggaattgtgccc

SEQ ID NO: 1666 - DNA, 22 bp, Artificial Sequence
  Description of Artificial Sequence: Synthetic oligonucleotide
ctagaggataatattaacccgg

SEQ ID NO: 1667 - DNA, 22 bp, Artificial Sequence
  Description of Artificial Sequence: Synthetic oligonucleotide
tttaccaatactggatattcgg

SEQ ID NO: 1668 - DNA, 22 bp, Artificial Sequence
  Description of Artificial Sequence: Synthetic oligonucleotide
taatttatcaatttggccagcc

SEQ ID NO: 1669 - DNA, 22 bp, Artificial Sequence
  Description of Artificial Sequence: Synthetic oligonucleotide
ttaacatcatccatccagaggc

SEQ ID NO: 1670 - DNA, 22 bp, Artificial Sequence
  Description of Artificial Sequence: Synthetic oligonucleotide
atttccttcgctctggtacgca

SEQ ID NO: 1671 - DNA, 22 bp, Artificial Sequence
  Description of Artificial Sequence: Synthetic oligonucleotide
taatcttggcaagttctgccct

SEQ ID NO: 1672 - DNA, 22 bp, Artificial Sequence
  Description of Artificial Sequence: Synthetic oligonucleotide
tttggtatccagcctctagtct

SEQ ID NO: 1673 - DNA, 22 bp, Artificial Sequence
  Description of Artificial Sequence: Synthetic oligonucleotide
tttcttgtggagagtaactggt

SEQ ID NO: 1674 - DNA, 22 bp, Artificial Sequence
  Description of Artificial Sequence: Synthetic oligonucleotide
aattattcacatcttcacacca

SEQ ID NO: 1675 - DNA, 22 bp, Artificial Sequence
  Description of Artificial Sequence: Synthetic oligonucleotide
tttctcaatctgatccgtcggt

SEQ ID NO: 1676 - DNA, 22 bp, Artificial Sequence
  Description of Artificial Sequence: Synthetic oligonucleotide
tttcaggactatgtaccatgcc

SEQ ID NO: 1677 - DNA, 22 bp, Artificial Sequence
  Description of Artificial Sequence: Synthetic oligonucleotide
tataagttcaacatcagagccc

SEQ ID NO: 1678 - DNA, 22 bp, Artificial Sequence
  Description of Artificial Sequence: Synthetic oligonucleotide
tttacattccacaactgcaggc

SEQ ID NO: 1679 - DNA, 22 bp, Artificial Sequence
  Description of Artificial Sequence: Synthetic oligonucleotide
attcacacaaatgtaatgccct

SEQ ID NO: 1680 - DNA, 22 bp, Artificial Sequence
  Description of Artificial Sequence: Synthetic oligonucleotide
attaattaactctgctacccgt

SEQ ID NO: 1681 - DNA, 22 bp, Artificial Sequence
  Description of Artificial Sequence: Synthetic oligonucleotide
ttatacatcaggattgttagga

SEQ ID NO: 1682 - DNA, 22 bp, Artificial Sequence
  Description of Artificial Sequence: Synthetic oligonucleotide
atattccaagtctcaggaccct

SEQ ID NO: 1683 - DNA, 22 bp, Artificial Sequence
  Description of Artificial Sequence: Synthetic oligonucleotide
tttgcaggttagatattgggcc

SEQ ID NO: 1684 - DNA, 22 bp, Artificial Sequence
  Description of Artificial Sequence: Synthetic oligonucleotide
ttctagctgctctttgctgggc

SEQ ID NO: 1685 - DNA, 22 bp, Artificial Sequence
  Description of Artificial Sequence: Synthetic oligonucleotide
tatagtgagcaatgtgtcccgt

SEQ ID NO: 1686 - DNA, 22 bp, Artificial Sequence
  Description of Artificial Sequence: Synthetic oligonucleotide
ttctcacaccatgtgcaatgcc

SEQ ID NO: 1687 - DNA, 22 bp, Artificial Sequence
  Description of Artificial Sequence: Synthetic oligonucleotide
ttcagctttcaggatctcaggg

SEQ ID NO: 1688 - DNA, 22 bp, Artificial Sequence
  Description of Artificial Sequence: Synthetic oligonucleotide
ttcgatgaggctgatatctgca

SEQ ID NO: 1689 - DNA, 22 bp, Artificial Sequence
  Description of Artificial Sequence: Synthetic oligonucleotide
ttcttctctctcctgaccaggt

SEQ ID NO: 1690 - DNA, 22 bp, Artificial Sequence
  Description of Artificial Sequence: Synthetic oligonucleotide
ttgctttagaatatcctgtcct

SEQ ID NO: 1691 - DNA, 22 bp, Artificial Sequence
  Description of Artificial Sequence: Synthetic oligonucleotide
tttgtagtccatagtatttcgt

SEQ ID NO: 1692 - DNA, 22 bp, Artificial Sequence
  Description of Artificial Sequence: Synthetic oligonucleotide
tttatgtttctcttcatcagcc

SEQ ID NO: 1693 - DNA, 22 bp, Artificial Sequence
  Description of Artificial Sequence: Synthetic oligonucleotide
tttgacagagactttcgctggt

SEQ ID NO: 1694 - DNA, 22 bp, Artificial Sequence
  Description of Artificial Sequence: Synthetic oligonucleotide
taaagaaagaagtgcttgccct

SEQ ID NO: 1695 - DNA, 22 bp, Artificial Sequence
  Description of Artificial Sequence: Synthetic oligonucleotide
aatccgtaaccattccggacgt

SEQ ID NO: 1696 - DNA, 22 bp, Artificial Sequence
  Description of Artificial Sequence: Synthetic oligonucleotide
gtagtgtttcacattgtcaccc

SEQ ID NO: 1697 - DNA, 22 bp, Artificial Sequence
  Description of Artificial Sequence: Synthetic oligonucleotide
tttggtaaccatccgctttgct

SEQ ID NO: 1698 - DNA, 22 bp, Artificial Sequence
  Description of Artificial Sequence: Synthetic oligonucleotide
aatttggaacaatgtgaatgac

SEQ ID NO: 1699 - DNA, 22 bp, Artificial Sequence
  Description of Artificial Sequence: Synthetic oligonucleotide
ttaagggtggaactgtagtgcc

SEQ ID NO: 1700 - DNA, 22 bp, Artificial Sequence
  Description of Artificial Sequence: Synthetic oligonucleotide
tacttctatgctatgggctgct

SEQ ID NO: 1701 - DNA, 22 bp, Artificial Sequence
  Description of Artificial Sequence: Synthetic oligonucleotide
atgctaagtactttcacttccc

SEQ ID NO: 1702 - DNA, 22 bp, Artificial Sequence
  Description of Artificial Sequence: Synthetic oligonucleotide
ttcattatagacctgcattgct

SEQ ID NO: 1703 - DNA, 22 bp, Artificial Sequence
  Description of Artificial Sequence: Synthetic oligonucleotide
tatgaccttggcctgattgcgg

SEQ ID NO: 1704 - DNA, 22 bp, Artificial Sequence
  Description of Artificial Sequence: Synthetic oligonucleotide
tttcttcttactttgctgggct

SEQ ID NO: 1705 - DNA, 22 bp, Artificial Sequence
  Description of Artificial Sequence: Synthetic oligonucleotide
aacaggaacagcatcaatggct

SEQ ID NO: 1706 - DNA, 22 bp, Artificial Sequence
  Description of Artificial Sequence: Synthetic oligonucleotide
tttcatagtcataataagggtc

SEQ ID NO: 1707 - DNA, 22 bp, Artificial Sequence
  Description of Artificial Sequence: Synthetic oligonucleotide
tatagatatatttctgatccgg

SEQ ID NO: 1708 - DNA, 22 bp, Artificial Sequence
  Description of Artificial Sequence: Synthetic oligonucleotide
tgacagtatcctttagcatcta

SEQ ID NO: 1709 - DNA, 22 bp, Artificial Sequence
  Description of Artificial Sequence: Synthetic oligonucleotide
taggatccttacagtctttggc

SEQ ID NO: 1710 - DNA, 22 bp, Artificial Sequence
  Description of Artificial Sequence: Synthetic oligonucleotide
atttgtgctcccttaagcagca

SEQ ID NO: 1711 - DNA, 22 bp, Artificial Sequence
  Description of Artificial Sequence: Synthetic oligonucleotide
atgtacagtaagggaggatcgt

SEQ ID NO: 1712 - DNA, 22 bp, Artificial Sequence
  Description of Artificial Sequence: Synthetic oligonucleotide
tatggtaagtaagagatgagct

SEQ ID NO: 1713 - DNA, 22 bp, Artificial Sequence
  Description of Artificial Sequence: Synthetic oligonucleotide
atttcattgtcatccatttgct

SEQ ID NO: 1714 - DNA, 22 bp, Artificial Sequence
  Description of Artificial Sequence: Synthetic oligonucleotide
ttagagcatccttatatatggt

SEQ ID NO: 1715 - DNA, 22 bp, Artificial Sequence
  Description of Artificial Sequence: Synthetic oligonucleotide
tttccctccaggaagaacgggc

SEQ ID NO: 1716 - DNA, 22 bp, Artificial Sequence
  Description of Artificial Sequence: Synthetic oligonucleotide
tatggtcctgaataggtctgga

SEQ ID NO: 1717 - DNA, 22 bp, Artificial Sequence
  Description of Artificial Sequence: Synthetic oligonucleotide
ttatacatccagaacacgtgca

SEQ ID NO: 1718 - DNA, 22 bp, Artificial Sequence
  Description of Artificial Sequence: Synthetic oligonucleotide
aatgtctttcaagaatggccca

SEQ ID NO: 1719 - DNA, 22 bp, Artificial Sequence
  Description of Artificial Sequence: Synthetic oligonucleotide
ttcctggagtcgagtaagagcc

SEQ ID NO: 1720 - DNA, 22 bp, Artificial Sequence
  Description of Artificial Sequence: Synthetic oligonucleotide
ctttagagtcatttccatggcc

SEQ ID NO: 1721 - DNA, 22 bp, Artificial Sequence
  Description of Artificial Sequence: Synthetic oligonucleotide
atttcttgtgacatatatggca

SEQ ID NO: 1722 - DNA, 22 bp, Artificial Sequence
  Description of Artificial Sequence: Synthetic oligonucleotide
ttataaccttctttgttcacct

SEQ ID NO: 1723 - DNA, 22 bp, Artificial Sequence
  Description of Artificial Sequence: Synthetic oligonucleotide
atattgtgatgtttaatgaggt

SEQ ID NO: 1724 - DNA, 22 bp, Artificial Sequence
  Description of Artificial Sequence: Synthetic oligonucleotide
cactgatcacatctatagggct

SEQ ID NO: 1725 - DNA, 22 bp, Artificial Sequence
  Description of Artificial Sequence: Synthetic oligonucleotide
ttattgatgaatacaacttccc

SEQ ID NO: 1726 - DNA, 22 bp, Artificial Sequence
  Description of Artificial Sequence: Synthetic oligonucleotide
tttgtaagtcccattatctccc

SEQ ID NO: 1727 - DNA, 22 bp, Artificial Sequence
  Description of Artificial Sequence: Synthetic oligonucleotide
ataagtacccagttctccagca

SEQ ID NO: 1728 - DNA, 22 bp, Artificial Sequence
  Description of Artificial Sequence: Synthetic oligonucleotide
ataagtacttccatactgacat

SEQ ID NO: 1729 - DNA, 22 bp, Artificial Sequence
  Description of Artificial Sequence: Synthetic oligonucleotide
atttatgtagtacttcctggct

SEQ ID NO: 1730 - DNA, 22 bp, Artificial Sequence
  Description of Artificial Sequence: Synthetic oligonucleotide
taacaagagaagaatgggcgct

SEQ ID NO: 1731 - DNA, 22 bp, Artificial Sequence
  Description of Artificial Sequence: Synthetic oligonucleotide
attaatcaccaataaagtaccc

SEQ ID NO: 1732 - DNA, 22 bp, Artificial Sequence
  Description of Artificial Sequence: Synthetic oligonucleotide
atgtgaattaatttgcacaggt

SEQ ID NO: 1733 - DNA, 22 bp, Artificial Sequence
  Description of Artificial Sequence: Synthetic oligonucleotide
ttatctcttccttgaaacacgc

SEQ ID NO: 1734 - DNA, 22 bp, Artificial Sequence
  Description of Artificial Sequence: Synthetic oligonucleotide
ttgaactcccgctggcagcgca

SEQ ID NO: 1735 - DNA, 22 bp, Artificial Sequence
  Description of Artificial Sequence: Synthetic oligonucleotide
tttccagtgctgatagaggcct

SEQ ID NO: 1736 - DNA, 22 bp, Artificial Sequence
  Description of Artificial Sequence: Synthetic oligonucleotide
atattgacccgggattagcggg

SEQ ID NO: 1737 - DNA, 22 bp, Artificial Sequence
  Description of Artificial Sequence: Synthetic oligonucleotide
ttggaatgaaacttgcaggccc

SEQ ID NO: 1738 - DNA, 22 bp, Artificial Sequence
  Description of Artificial Sequence: Synthetic oligonucleotide
tttctcttgtgtgtacttcccg

SEQ ID NO: 1739 - DNA, 22 bp, Artificial Sequence
  Description of Artificial Sequence: Synthetic oligonucleotide
ttaatgagacagtggttctggc

SEQ ID NO: 1740 - DNA, 22 bp, Artificial Sequence
  Description of Artificial Sequence: Synthetic oligonucleotide
ttaattgactgtggtgtcagga

SEQ ID NO: 1741 - DNA, 22 bp, Artificial Sequence
  Description of Artificial Sequence: Synthetic oligonucleotide
ttgggcttctggctgaagcggc

SEQ ID NO: 1742 - DNA, 22 bp, Artificial Sequence
  Description of Artificial Sequence: Synthetic oligonucleotide
attgtcaaggaaattaacagcc

SEQ ID NO: 1743 - DNA, 22 bp, Artificial Sequence
  Description of Artificial Sequence: Synthetic oligonucleotide
aataatccatcttaagactcct

SEQ ID NO: 1744 - DNA, 22 bp, Artificial Sequence
  Description of Artificial Sequence: Synthetic oligonucleotide
tttgaaaccactatggcgagcc

SEQ ID NO: 1745 - DNA, 22 bp, Artificial Sequence
  Description of Artificial Sequence: Synthetic oligonucleotide
ttaaatcctccaaacatgtgcg

SEQ ID NO: 1746 - DNA, 22 bp, Artificial Sequence
  Description of Artificial Sequence: Synthetic oligonucleotide
atttcacttgggaccatgacct

SEQ ID NO: 1747 - DNA, 22 bp, Artificial Sequence
  Description of Artificial Sequence: Synthetic oligonucleotide
atatggaagcccaatatcagcc

SEQ ID NO: 1748 - protein, 4 aa, Artificial Sequence
  Description of Artificial Sequence: Synthetic peptide
DEAD

SEQ ID NO: 1749 - protein, 4 aa, Artificial Sequence
  Description of Artificial Sequence: Synthetic peptide
DEAH

SEQ ID NO: 1750 - protein, 4 aa, Artificial Sequence
  Description of Artificial Sequence: Synthetic peptide
KDEL

SEQ ID NO: 1751 - DNA, 22 bp, Artificial Sequence
  Description of Artificial Sequence: Synthetic oligonucleotide
attctccaggaccctgtctggg

SEQ ID NO: 1752 - DNA, 22 bp, Artificial Sequence
  Description of Artificial Sequence: Synthetic oligonucleotide
atttggatcaacttggatagct

SEQ ID NO: 1753 - DNA, 22 bp, Artificial Sequence
  Description of Artificial Sequence: Synthetic oligonucleotide
tttacttctgatggtcttggca

SEQ ID NO: 1754 - DNA, 22 bp, Artificial Sequence
  Description of Artificial Sequence: Synthetic oligonucleotide
ttacagatatccatcatatcca

SEQ ID NO: 1755 - DNA, 22 bp, Artificial Sequence
  Description of Artificial Sequence: Synthetic oligonucleotide
tataaatgtcaccaatggtggg

SEQ ID NO: 1756 - DNA, 22 bp, Artificial Sequence
  Description of Artificial Sequence: Synthetic oligonucleotide
ttactgatgtacacactttgga

SEQ ID NO: 1757 - DNA, 22 bp, Artificial Sequence
  Description of Artificial Sequence: Synthetic oligonucleotide
atatgaaatgtaggatttggca

SEQ ID NO: 1758 - DNA, 22 bp, Artificial Sequence
  Description of Artificial Sequence: Synthetic oligonucleotide
aacacatctccttaaagaggct

SEQ ID NO: 1759 - DNA, 22 bp, Artificial Sequence
  Description of Artificial Sequence: Synthetic oligonucleotide
tattgtttccagcttggttgct

SEQ ID NO: 1760 - DNA, 22 bp, Artificial Sequence
  Description of Artificial Sequence: Synthetic oligonucleotide
attactagattatttggccgct

SEQ ID NO: 1761 - DNA, 22 bp, Artificial Sequence
  Description of Artificial Sequence: Synthetic oligonucleotide
ttgaacaaggaatttagcagat

SEQ ID NO: 1762 - DNA, 22 bp, Artificial Sequence
  Description of Artificial Sequence: Synthetic oligonucleotide
tttaccaaagttcaagataggc

SEQ ID NO: 1763 - DNA, 22 bp, Artificial Sequence
  Description of Artificial Sequence: Synthetic oligonucleotide
ttataagacaatttatcaggca

SEQ ID NO: 1764 - DNA, 22 bp, Artificial Sequence
  Description of Artificial Sequence: Synthetic oligonucleotide
tgtagatttcatccagtctctc

SEQ ID NO: 1765 - DNA, 22 bp, Artificial Sequence
  Description of Artificial Sequence: Synthetic oligonucleotide
ttgtaatcaagattcttgggcg

SEQ ID NO: 1766 - DNA, 22 bp, Artificial Sequence
  Description of Artificial Sequence: Synthetic oligonucleotide
atagacaaaggatttgacaggc

SEQ ID NO: 1767 - DNA, 22 bp, Artificial Sequence
  Description of Artificial Sequence: Synthetic oligonucleotide
tttgctttccaaggaggaacgg

SEQ ID NO: 1768 - DNA, 22 bp, Artificial Sequence
  Description of Artificial Sequence: Synthetic oligonucleotide
tattccatgcttaagaatacgt

SEQ ID NO: 1769 - DNA, 22 bp, Artificial Sequence
  Description of Artificial Sequence: Synthetic oligonucleotide
tattctaatccaatatacagca

SEQ ID NO: 1770 - DNA, 22 bp, Artificial Sequence
  Description of Artificial Sequence: Synthetic oligonucleotide
ataacaaataccacagagagcc

SEQ ID NO: 1771 - DNA, 22 bp, Artificial Sequence
  Description of Artificial Sequence: Synthetic oligonucleotide
tatgattccaacatgatatggc

SEQ ID NO: 1772 - DNA, 22 bp, Artificial Sequence
  Description of Artificial Sequence: Synthetic oligonucleotide
ttagcttaatacacagagaccc

SEQ ID NO: 1773 - DNA, 22 bp, Artificial Sequence
  Description of Artificial Sequence: Synthetic oligonucleotide
atataaagctagaagctgacca

SEQ ID NO: 1774 - DNA, 22 bp, Artificial Sequence
  Description of Artificial Sequence: Synthetic oligonucleotide
aatgaatgtgctgtacggagga

SEQ ID NO: 1775 - DNA, 22 bp, Artificial Sequence
  Description of Artificial Sequence: Synthetic oligonucleotide
tttcctggagagttgcttgggc

SEQ ID NO: 1776 - DNA, 22 bp, Artificial Sequence
  Description of Artificial Sequence: Synthetic oligonucleotide
tttagcttcctgctgatctgcc

SEQ ID NO: 1777 - DNA, 22 bp, Artificial Sequence
  Description of Artificial Sequence: Synthetic oligonucleotide
tttgtaagagtcaggaggacct

SEQ ID NO: 1778 - DNA, 22 bp, Artificial Sequence
  Description of Artificial Sequence: Synthetic oligonucleotide
tcttgtactctgtcactgtctt

SEQ ID NO: 1779 - DNA, 22 bp, Artificial Sequence
  Description of Artificial Sequence: Synthetic oligonucleotide
ttaagaaatcttgaggccagcg

SEQ ID NO: 1780 - DNA, 22 bp, Artificial Sequence
  Description of Artificial Sequence: Synthetic oligonucleotide
atgtgatagagggactgttggg

SEQ ID NO: 1781 - DNA, 22 bp, Artificial Sequence
  Description of Artificial Sequence: Synthetic oligonucleotide
ttctctccataaactgattccc

SEQ ID NO: 1782 - DNA, 22 bp, Artificial Sequence
  Description of Artificial Sequence: Synthetic oligonucleotide
tttcacagtaagctttccaggt

SEQ ID NO: 1783 - DNA, 22 bp, Artificial Sequence
  Description of Artificial Sequence: Synthetic oligonucleotide
ttattgcctttacttctgtggg

SEQ ID NO: 1784 - DNA, 22 bp, Artificial Sequence
  Description of Artificial Sequence: Synthetic oligonucleotide
ctaatgatggatactttggcct

SEQ ID NO: 1785 - DNA, 22 bp, Artificial Sequence
  Description of Artificial Sequence: Synthetic oligonucleotide
ttctcatccaggaagaggaccc

SEQ ID NO: 1786 - DNA, 22 bp, Artificial Sequence
  Description of Artificial Sequence: Synthetic oligonucleotide
ttattaattagcacaattaggt

SEQ ID NO: 1787 - DNA, 22 bp, Artificial Sequence
  Description of Artificial Sequence: Synthetic oligonucleotide
atgggataagatttctaaaccc

SEQ ID NO: 1788 - DNA, 22 bp, Artificial Sequence
  Description of Artificial Sequence: Synthetic oligonucleotide
tttgcagatgggtgccagaggt

SEQ ID NO: 1789 - DNA, 22 bp, Artificial Sequence
  Description of Artificial Sequence: Synthetic oligonucleotide
ttcttcagttgcttagagggcc

SEQ ID NO: 1790 - DNA, 22 bp, Artificial Sequence
  Description of Artificial Sequence: Synthetic oligonucleotide
ttgaagaagaacacgggcaggg

SEQ ID NO: 1791 - DNA, 22 bp, Artificial Sequence
  Description of Artificial Sequence: Synthetic oligonucleotide
tttcaccaaatcatactgtccc

SEQ ID NO: 1792 - DNA, 22 bp, Artificial Sequence
  Description of Artificial Sequence: Synthetic oligonucleotide
atatcgatccagtttcctggcc

SEQ ID NO: 1793 - DNA, 22 bp, Artificial Sequence
  Description of Artificial Sequence: Synthetic oligonucleotide
tattgtatagatggaggctgcg

SEQ ID NO: 1794 - DNA, 22 bp, Artificial Sequence
  Description of Artificial Sequence: Synthetic oligonucleotide
attcttgcttattcagtgggcg

SEQ ID NO: 1795 - DNA, 22 bp, Artificial Sequence
  Description of Artificial Sequence: Synthetic oligonucleotide
taacccaagaattatattcgga

SEQ ID NO: 1796 - DNA, 22 bp, Artificial Sequence
  Description of Artificial Sequence: Synthetic oligonucleotide
tttctctttctcttcacatcca

SEQ ID NO: 1797 - DNA, 22 bp, Artificial Sequence
  Description of Artificial Sequence: Synthetic oligonucleotide
ttaaggcaacaaatagtgtcgt

SEQ ID NO: 1798 - DNA, 22 bp, Artificial Sequence
  Description of Artificial Sequence: Synthetic oligonucleotide
tttattgcaggttccaaccggg

SEQ ID NO: 1799 - DNA, 22 bp, Artificial Sequence
  Description of Artificial Sequence: Synthetic oligonucleotide
tgaagtactgatgttcagcggg

SEQ ID NO: 1800 - DNA, 22 bp, Artificial Sequence
  Description of Artificial Sequence: Synthetic oligonucleotide
attccaaatctcttcacttgcc

SEQ ID NO: 1801 - DNA, 22 bp, Artificial Sequence
  Description of Artificial Sequence: Synthetic oligonucleotide
ttaacaaattggactattggac

SEQ ID NO: 1802 - DNA, 22 bp, Artificial Sequence
  Description of Artificial Sequence: Synthetic oligonucleotide
atatgatgcctcattatgagcg

SEQ ID NO: 1803 - DNA, 22 bp, Artificial Sequence
  Description of Artificial Sequence: Synthetic oligonucleotide
ttaagtaatgcgatattgagca

SEQ ID NO: 1804 - DNA, 22 bp, Artificial Sequence
  Description of Artificial Sequence: Synthetic oligonucleotide
attaaacttaactttggcacgg

SEQ ID NO: 1805 - DNA, 22 bp, Artificial Sequence
  Description of Artificial Sequence: Synthetic oligonucleotide
tatagatataaatttgccgcgc

SEQ ID NO: 1806 - DNA, 22 bp, Artificial Sequence
  Description of Artificial Sequence: Synthetic oligonucleotide
ttcttgagtaaagtcaagggcg

SEQ ID NO: 1807 - DNA, 22 bp, Artificial Sequence
  Description of Artificial Sequence: Synthetic oligonucleotide
tttctttgagggaaattaacgc

SEQ ID NO: 1808 - DNA, 22 bp, Artificial Sequence
  Description of Artificial Sequence: Synthetic oligonucleotide
tgtaattaggagtcccacacag

SEQ ID NO: 1809 - DNA, 22 bp, Artificial Sequence
  Description of Artificial Sequence: Synthetic oligonucleotide
atgtttcctaactttgtctcct

SEQ ID NO: 1810 - DNA, 22 bp, Artificial Sequence
  Description of Artificial Sequence: Synthetic oligonucleotide
taataatgtaaggcacaaacca

SEQ ID NO: 1811 - DNA, 22 bp, Artificial Sequence
  Description of Artificial Sequence: Synthetic oligonucleotide
ttctcttctccacagctaggca

SEQ ID NO: 1812 - DNA, 22 bp, Artificial Sequence
  Description of Artificial Sequence: Synthetic oligonucleotide
tataaataggatggaggatggg

SEQ ID NO: 1813 - DNA, 22 bp, Artificial Sequence
  Description of Artificial Sequence: Synthetic oligonucleotide
aatagtcagacgcatatgtgac

SEQ ID NO: 1814 - DNA, 22 bp, Artificial Sequence
  Description of Artificial Sequence: Synthetic oligonucleotide
tttctccatgaatatgtcgcct

SEQ ID NO: 1815 - DNA, 22 bp, Artificial Sequence
  Description of Artificial Sequence: Synthetic oligonucleotide
tatggttctcattctatttgcc

SEQ ID NO: 1816 - DNA, 22 bp, Artificial Sequence
  Description of Artificial Sequence: Synthetic oligonucleotide
tttaactatgacatccctggag

SEQ ID NO: 1817 - DNA, 22 bp, Artificial Sequence
  Description of Artificial Sequence: Synthetic oligonucleotide
attatcctcccagacatgtgca

SEQ ID NO: 1818 - DNA, 22 bp, Artificial Sequence
  Description of Artificial Sequence: Synthetic oligonucleotide
tttcaacttaatactaagtgca

SEQ ID NO: 1819 - DNA, 22 bp, Artificial Sequence
  Description of Artificial Sequence: Synthetic oligonucleotide
ttaagtacacatatactaagct

SEQ ID NO: 1820 - DNA, 22 bp, Artificial Sequence
  Description of Artificial Sequence: Synthetic oligonucleotide
atagcaagagaaataatagcta

SEQ ID NO: 1821 - DNA, 22 bp, Artificial Sequence
  Description of Artificial Sequence: Synthetic oligonucleotide
atagactttctcaacatttgct

SEQ ID NO: 1822 - DNA, 22 bp, Artificial Sequence
  Description of Artificial Sequence: Synthetic oligonucleotide
aattcagaacacatggaatggg

SEQ ID NO: 1823 - DNA, 22 bp, Artificial Sequence
  Description of Artificial Sequence: Synthetic oligonucleotide
ttatctaaagcattcataacca

SEQ ID NO: 1824 - DNA, 22 bp, Artificial Sequence
  Description of Artificial Sequence: Synthetic oligonucleotide
tttaaagctaatcttcttaggt

SEQ ID NO: 1825 - DNA, 22 bp, Artificial Sequence
  Description of Artificial Sequence: Synthetic oligonucleotide
ttggcagtaaatcgtgtaggcc

SEQ ID NO: 1826 - DNA, 22 bp, Artificial Sequence
  Description of Artificial Sequence: Synthetic oligonucleotide
tataaacacaaaggaagtggcg

SEQ ID NO: 1827 - DNA, 22 bp, Artificial Sequence
  Description of Artificial Sequence: Synthetic oligonucleotide
taaacatacttcaaacacagca

SEQ ID NO: 1828 - DNA, 22 bp, Artificial Sequence
  Description of Artificial Sequence: Synthetic oligonucleotide
tttcaccaccttataaatgcca

SEQ ID NO: 1829 - DNA, 22 bp, Artificial Sequence
  Description of Artificial Sequence: Synthetic oligonucleotide
aattcataccatttgcctgtcc

SEQ ID NO: 1830 - DNA, 22 bp, Artificial Sequence
  Description of Artificial Sequence: Synthetic oligonucleotide
ttatacatcaggattgttagga

SEQ ID NO: 1831 - DNA, 22 bp, Artificial Sequence
  Description of Artificial Sequence: Synthetic oligonucleotide
tttgacagagactttcgctggt

SEQ ID NO: 1832 - DNA, 22 bp, Artificial Sequence
  Description of Artificial Sequence: Synthetic oligonucleotide
tttcatagtcataataagggtc

SEQ ID NO: 1833 - DNA, 22 bp, Artificial Sequence
  Description of Artificial Sequence: Synthetic oligonucleotide
tatagatatatttctgatccgg

SEQ ID NO: 1834 - DNA, 22 bp, Artificial Sequence
  Description of Artificial Sequence: Synthetic oligonucleotide
tgacagtatcctttagcatcta

SEQ ID NO: 1835 - DNA, 22 bp, Artificial Sequence
  Description of Artificial Sequence: Synthetic oligonucleotide
aatagacatatccatggtgcct

SEQ ID NO: 1836 - DNA, 22 bp, Artificial Sequence
  Description of Artificial Sequence: Synthetic oligonucleotide
tatactaaagacaaaggcagct

SEQ ID NO: 1837 - DNA, 22 bp, Artificial Sequence
  Description of Artificial Sequence: Synthetic oligonucleotide
tttatgcaaacagttaaatgct

SEQ ID NO: 1838 - DNA, 22 bp, Artificial Sequence
  Description of Artificial Sequence: Synthetic oligonucleotide
tattagtaatcgtttctgtcca

SEQ ID NO: 1839 - DNA, 22 bp, Artificial Sequence
  Description of Artificial Sequence: Synthetic oligonucleotide
atacaatggaatacagattgct

SEQ ID NO: 1840 - DNA, 22 bp, Artificial Sequence
  Description of Artificial Sequence: Synthetic oligonucleotide
tacatgatgactccaatggccc

SEQ ID NO: 1841 - DNA, 22 bp, Artificial Sequence
  Description of Artificial Sequence: Synthetic oligonucleotide
ttaaaccaatacaagcactgca

SEQ ID NO: 1842 - DNA, 22 bp, Artificial Sequence
  Description of Artificial Sequence: Synthetic oligonucleotide
ttatctaaagcattcataacca

SEQ ID NO: 1843 - DNA, 22 bp, Artificial Sequence
  Description of Artificial Sequence: Synthetic oligonucleotide
tattactagcaaactgacaccc

SEQ ID NO: 1844 - DNA, 22 bp, Artificial Sequence
  Description of Artificial Sequence: Synthetic oligonucleotide
attccatctcgcttccctcggc

SEQ ID NO: 1845 - DNA, 22 bp, Artificial Sequence
  Description of Artificial Sequence: Synthetic oligonucleotide
ttctctccataaactgattccc

SEQ ID NO: 1846 - DNA, 22 bp, Artificial Sequence
  Description of Artificial Sequence: Synthetic oligonucleotide
ttctaacggaccaaactgtgcc

SEQ ID NO: 1847 - DNA, 22 bp, Artificial Sequence
  Description of Artificial Sequence: Synthetic oligonucleotide
ttgggttgtcctttcgtttgcc

SEQ ID NO: 1848 - DNA, 22 bp, Artificial Sequence
  Description of Artificial Sequence: Synthetic oligonucleotide
ttaatttcagtccataactcgt

SEQ ID NO: 1849 - DNA, 22 bp, Artificial Sequence
  Description of Artificial Sequence: Synthetic oligonucleotide
ctagaatttgaattgctgagcc

SEQ ID NO: 1850 - DNA, 22 bp, Artificial Sequence
  Description of Artificial Sequence: Synthetic oligonucleotide
taggctttgatgctcatgcggc

SEQ ID NO: 1851 - DNA, 22 bp, Artificial Sequence
  Description of Artificial Sequence: Synthetic oligonucleotide
ttccaaaggcacaataacacca

SEQ ID NO: 1852 - DNA, 22 bp, Artificial Sequence
  Description of Artificial Sequence: Synthetic oligonucleotide
atactgtccatcaatatcagct

SEQ ID NO: 1853 - DNA, 22 bp, Artificial Sequence
  Description of Artificial Sequence: Synthetic oligonucleotide
atgtttcctaactttgtctcct

SEQ ID NO: 1854 - DNA, 22 bp, Artificial Sequence
  Description of Artificial Sequence: Synthetic oligonucleotide
tttgctttccaaggaggaacgg

SEQ ID NO: 1855 - DNA, 22 bp, Artificial Sequence
  Description of Artificial Sequence: Synthetic oligonucleotide
aatgaactgctggttgggtcca

SEQ ID NO: 1856 - DNA, 22 bp, Artificial Sequence
  Description of Artificial Sequence: Synthetic oligonucleotide
ttatctcatgactggttatgca

SEQ ID NO: 1857 - DNA, 22 bp, Artificial Sequence
  Description of Artificial Sequence: Synthetic oligonucleotide
ttcacgtaacacatacagggca

SEQ ID NO: 1858 - DNA, 22 bp, Artificial Sequence
  Description of Artificial Sequence: Synthetic oligonucleotide
tattgctccacaatgaagtcct

SEQ ID NO: 1859 - DNA, 22 bp, Artificial Sequence
  Description of Artificial Sequence: Synthetic oligonucleotide
atttattctggaaatagctggt

SEQ ID NO: 1860 - DNA, 22 bp, Artificial Sequence
  Description of Artificial Sequence: Synthetic oligonucleotide
ttcaataagaggaacatcagct

SEQ ID NO: 1861 - DNA, 22 bp, Artificial Sequence
  Description of Artificial Sequence: Synthetic oligonucleotide
tgatctttgcaccctggttgcc

SEQ ID NO: 1862 - DNA, 22 bp, Artificial Sequence
  Description of Artificial Sequence: Synthetic oligonucleotide
taagcgtatacaacagtgggct

SEQ ID NO: 1863 - DNA, 22 bp, Artificial Sequence
  Description of Artificial Sequence: Synthetic oligonucleotide
taagctgtgcgaagggctcggg

SEQ ID NO: 1864 - DNA, 22 bp, Artificial Sequence
  Description of Artificial Sequence: Synthetic oligonucleotide
tttatgtttccgttgatgacct

SEQ ID NO: 1865 - DNA, 22 bp, Artificial Sequence
  Description of Artificial Sequence: Synthetic oligonucleotide
ttatgtgcccttagccgctggc

SEQ ID NO: 1866 - DNA, 22 bp, Artificial Sequence
  Description of Artificial Sequence: Synthetic oligonucleotide
tttagcttcctgctgatctgcc

SEQ ID NO: 1867 - DNA, 22 bp, Artificial Sequence
  Description of Artificial Sequence: Synthetic oligonucleotide
tttgagctttactgaacatcca

SEQ ID NO: 1868 - DNA, 22 bp, Artificial Sequence
  Description of Artificial Sequence: Synthetic oligonucleotide
tatggttagccgtttggatggg

SEQ ID NO: 1869 - DNA, 22 bp, Artificial Sequence
  Description of Artificial Sequence: Synthetic oligonucleotide
atataaagctagaagctgacca

SEQ ID NO: 1870 - DNA, 22 bp, Artificial Sequence
  Description of Artificial Sequence: Synthetic oligonucleotide
tttcaccaaatcatactgtccc

SEQ ID NO: 1871 - DNA, 22 bp, Artificial Sequence
  Description of Artificial Sequence: Synthetic oligonucleotide
tattctgtacaattcatatggt

SEQ ID NO: 1872 - DNA, 22 bp, Artificial Sequence
  Description of Artificial Sequence: Synthetic oligonucleotide
taatgcatttacttattctccc

SEQ ID NO: 1873 - DNA, 22 bp, Artificial Sequence
  Description of Artificial Sequence: Synthetic oligonucleotide
tttgagcaaagctgggtgcgcg

SEQ ID NO: 1874 - DNA, 22 bp, Artificial Sequence
  Description of Artificial Sequence: Synthetic oligonucleotide
tttaatacctgcctgagcaccg

SEQ ID NO: 1875 - DNA, 22 bp, Artificial Sequence
  Description of Artificial Sequence: Synthetic oligonucleotide
tacttcttgcagtaagcctcca

SEQ ID NO: 1876 - DNA, 22 bp, Artificial Sequence
  Description of Artificial Sequence: Synthetic oligonucleotide
tttgtgtttcaactgttctcgt

SEQ ID NO: 1877 - DNA, 22 bp, Artificial Sequence
  Description of Artificial Sequence: Synthetic oligonucleotide
tttgctctagattctggcagcc

SEQ ID NO: 1878 - DNA, 22 bp, Artificial Sequence
  Description of Artificial Sequence: Synthetic oligonucleotide
ttaaagtcccgcatcttgtcgt

SEQ ID NO: 1879 - DNA, 22 bp, Artificial Sequence
  Description of Artificial Sequence: Synthetic oligonucleotide
ttatgatcccaaatcattcgcc

SEQ ID NO: 1880 - DNA, 22 bp, Artificial Sequence
  Description of Artificial Sequence: Synthetic oligonucleotide
tataatgcacacaggacatggt

SEQ ID NO: 1881 - DNA, 22 bp, Artificial Sequence
  Description of Artificial Sequence: Synthetic oligonucleotide
tatgattccaacatgatatggc

SEQ ID NO: 1882 - DNA, 22 bp, Artificial Sequence
  Description of Artificial Sequence: Synthetic oligonucleotide
tttatgtaagcctctgcctgga

SEQ ID NO: 1883 - DNA, 22 bp, Artificial Sequence
  Description of Artificial Sequence: Synthetic oligonucleotide
gaatataaagacaaccctggct

SEQ ID NO: 1884 - DNA, 22 bp, Artificial Sequence
  Description of Artificial Sequence: Synthetic oligonucleotide
atattcatggccaacatctggc

SEQ ID NO: 1885 - DNA, 22 bp, Artificial Sequence
  Description of Artificial Sequence: Synthetic oligonucleotide
tttggaaactgcttaatgccgc

SEQ ID NO: 1886 - DNA, 22 bp, Artificial Sequence
  Description of Artificial Sequence: Synthetic oligonucleotide
atatctcaccactaggcctggc

SEQ ID NO: 1887 - DNA, 22 bp, Artificial Sequence
  Description of Artificial Sequence: Synthetic oligonucleotide
tattctgtacaattcatatggt

SEQ ID NO: 1888 - DNA, 22 bp, Artificial Sequence
  Description of Artificial Sequence: Synthetic oligonucleotide
attatgtctaagaggattacct

SEQ ID NO: 1889 - DNA, 22 bp, Artificial Sequence
  Description of Artificial Sequence: Synthetic oligonucleotide
aatacatataggagattgagga

SEQ ID NO: 1890 - DNA, 22 bp, Artificial Sequence
  Description of Artificial Sequence: Synthetic oligonucleotide
atagtgacacatgagaagtggg

SEQ ID NO: 1891 - DNA, 22 bp, Artificial Sequence
  Description of Artificial Sequence: Synthetic oligonucleotide
ttcaataagaggaacatcagct

SEQ ID NO: 1892 - DNA, 22 bp, Artificial Sequence
  Description of Artificial Sequence: Synthetic oligonucleotide
attatacaagatactgtttgct

SEQ ID NO: 1893 - DNA, 22 bp, Artificial Sequence
  Description of Artificial Sequence: Synthetic oligonucleotide
tatagccagaagtaaagaactc

SEQ ID NO: 1894 - DNA, 22 bp, Artificial Sequence
  Description of Artificial Sequence: Synthetic oligonucleotide
tattactagcaaactgacaccc

SEQ ID NO: 1895 - DNA, 22 bp, Artificial Sequence
  Description of Artificial Sequence: Synthetic oligonucleotide
ttctaacggaccaaactgtgcc

SEQ ID NO: 1896 - DNA, 22 bp, Artificial Sequence
  Description of Artificial Sequence: Synthetic oligonucleotide
ttcacgtaacacatacagggca

SEQ ID NO: 1897 - DNA, 22 bp, Artificial Sequence
  Description of Artificial Sequence: Synthetic oligonucleotide
tacatggttaagatattctgga

SEQ ID NO: 1898 - DNA, 22 bp, Artificial Sequence
  Description of Artificial Sequence: Synthetic oligonucleotide
tttagcaatcaattctttcgct

SEQ ID NO: 1899 - DNA, 22 bp, Artificial Sequence
  Description of Artificial Sequence: Synthetic oligonucleotide
tttgtagacatcctggagaggc

SEQ ID NO: 1900 - DNA, 22 bp, Artificial Sequence
  Description of Artificial Sequence: Synthetic oligonucleotide
tttagtgaagatcctcatggac

SEQ ID NO: 1901 - DNA, 22 bp, Artificial Sequence
  Description of Artificial Sequence: Synthetic oligonucleotide
ttgttaaaggaaacatccaggg

SEQ ID NO: 1902 - DNA, 22 bp, Artificial Sequence
  Description of Artificial Sequence: Synthetic oligonucleotide
ataaacattaccaaactttcct

SEQ ID NO: 1903 - DNA, 22 bp, Artificial Sequence
  Description of Artificial Sequence: Synthetic oligonucleotide
ttaatttcagtccataactcgt

SEQ ID NO: 1904 - DNA, 22 bp, Artificial Sequence
  Description of Artificial Sequence: Synthetic oligonucleotide
atttagcacaagattatcagcc

SEQ ID NO: 1905 - DNA, 22 bp, Artificial Sequence
  Description of Artificial Sequence: Synthetic oligonucleotide
ttaagtggataaggaaagcgct

SEQ ID NO: 1906 - DNA, 22 bp, Artificial Sequence
  Description of Artificial Sequence: Synthetic oligonucleotide
taaggattcagcatttcatggc

SEQ ID NO: 1907 - DNA, 22 bp, Artificial Sequence
  Description of Artificial Sequence: Synthetic oligonucleotide
ttagtgaatgatattgttagcc

SEQ ID NO: 1908 - DNA, 22 bp, Artificial Sequence
  Description of Artificial Sequence: Synthetic oligonucleotide
tttatactccaggatgcaggca

SEQ ID NO: 1909 - DNA, 22 bp, Artificial Sequence
  Description of Artificial Sequence: Synthetic oligonucleotide
tattgctccacaatgaagtcct

SEQ ID NO: 1910 - DNA, 22 bp, Artificial Sequence
  Description of Artificial Sequence: Synthetic oligonucleotide
attctatttgatgcaatgtcca

SEQ ID NO: 1911 - DNA, 22 bp, Artificial Sequence
  Description of Artificial Sequence: Synthetic oligonucleotide
ttcaatctccacacctttgggc

SEQ ID NO: 1912 - DNA, 22 bp, Artificial Sequence
  Description of Artificial Sequence: Synthetic oligonucleotide
ttatctaaagcattcataacca

SEQ ID NO: 1913 - DNA, 22 bp, Artificial Sequence
  Description of Artificial Sequence: Synthetic oligonucleotide
taattcaaacatctgtacactt

SEQ ID NO: 1914 - DNA, 22 bp, Artificial Sequence
  Description of Artificial Sequence: Synthetic oligonucleotide
aatagacatatccatggtgcct

SEQ ID NO: 1915 - DNA, 22 bp, Artificial Sequence
  Description of Artificial Sequence: Synthetic oligonucleotide
tttaatgctagggtggaaaggt

SEQ ID NO: 1916 - DNA, 22 bp, Artificial Sequence
  Description of Artificial Sequence: Synthetic oligonucleotide
attaaatcccatagcatgactg

SEQ ID NO: 1917 - DNA, 22 bp, Artificial Sequence
  Description of Artificial Sequence: Synthetic oligonucleotide
atatagcttactaagatctggg

SEQ ID NO: 1918 - DNA, 22 bp, Artificial Sequence
  Description of Artificial Sequence: Synthetic oligonucleotide
ttgggagaagtgcgggtgaggc

SEQ ID NO: 1919 - DNA, 22 bp, Artificial Sequence
  Description of Artificial Sequence: Synthetic oligonucleotide
taagtgtaagagtgcaaatggt

SEQ ID NO: 1920 - DNA, 22 bp, Artificial Sequence
  Description of Artificial Sequence: Synthetic oligonucleotide
ttctcatcaaagaactccactc

SEQ ID NO: 1921 - DNA, 22 bp, Artificial Sequence
  Description of Artificial Sequence: Synthetic oligonucleotide
tttaacttccatgatattggag

SEQ ID NO: 1922 - DNA, 22 bp, Artificial Sequence
  Description of Artificial Sequence: Synthetic oligonucleotide
tttaggatcagatttatctgct

SEQ ID NO: 1923 - DNA, 22 bp, Artificial Sequence
  Description of Artificial Sequence: Synthetic oligonucleotide
tttagccacagatatttcacct

SEQ ID NO: 1924 - DNA, 22 bp, Artificial Sequence
  Description of Artificial Sequence: Synthetic oligonucleotide
attatccaggacatcactgcca

SEQ ID NO: 1925 - DNA, 22 bp, Artificial Sequence
  Description of Artificial Sequence: Synthetic oligonucleotide
aattgtaattctcttagcaggt

SEQ ID NO: 1926 - DNA, 22 bp, Artificial Sequence
  Description of Artificial Sequence: Synthetic oligonucleotide
ttaacacacagtgtcctatggt

SEQ ID NO: 1927 - DNA, 22 bp, Artificial Sequence
  Description of Artificial Sequence: Synthetic oligonucleotide
taagcgtatacaacagtgggct

SEQ ID NO: 1928 - DNA, 22 bp, Artificial Sequence
  Description of Artificial Sequence: Synthetic oligonucleotide
atatccaataggttcatgtcga

SEQ ID NO: 1929 - DNA, 22 bp, Artificial Sequence
  Description of Artificial Sequence: Synthetic oligonucleotide
atgagtaatggaggtgtcccgt

SEQ ID NO: 1930 - DNA, 22 bp, Artificial Sequence
  Description of Artificial Sequence: Synthetic oligonucleotide
tatgtttctcttataacgaggg

SEQ ID NO: 1931 - DNA, 22 bp, Artificial Sequence
  Description of Artificial Sequence: Synthetic oligonucleotide
attcaaatcaacatcctctgca

SEQ ID NO: 1932 - DNA, 22 bp, Artificial Sequence
  Description of Artificial Sequence: Synthetic oligonucleotide
atttattcagggtgtaatactg

SEQ ID NO: 1933 - DNA, 22 bp, Artificial Sequence
  Description of Artificial Sequence: Synthetic oligonucleotide
ttatcttcccataacgaagcgt

SEQ ID NO: 1934 - DNA, 22 bp, Artificial Sequence
  Description of Artificial Sequence: Synthetic oligonucleotide
ttacagtaagagggttacagca

SEQ ID NO: 1935 - DNA, 22 bp, Artificial Sequence
  Description of Artificial Sequence: Synthetic oligonucleotide
ttaatgagtaatttgatctggg

SEQ ID NO: 1936 - DNA, 22 bp, Artificial Sequence
  Description of Artificial Sequence: Synthetic oligonucleotide
gatttctacaagacttctctgc

SEQ ID NO: 1937 - DNA, 22 bp, Artificial Sequence
  Description of Artificial Sequence: Synthetic oligonucleotide
tagtggcatcagttgcaatgga

SEQ ID NO: 1938 - DNA, 22 bp, Artificial Sequence
  Description of Artificial Sequence: Synthetic oligonucleotide
atgtggttcccagagcacaggt

SEQ ID NO: 1939 - DNA, 22 bp, Artificial Sequence
  Description of Artificial Sequence: Synthetic oligonucleotide
ttatctcatgactggttatgca

SEQ ID NO: 1940 - DNA, 22 bp, Artificial Sequence
  Description of Artificial Sequence: Synthetic oligonucleotide
ttaacacctgaaataccttgct

SEQ ID NO: 1941 - DNA, 22 bp, Artificial Sequence
  Description of Artificial Sequence: Synthetic oligonucleotide
atatgagaggatggtggctcct

SEQ ID NO: 1942 - DNA, 22 bp, Artificial Sequence
  Description of Artificial Sequence: Synthetic oligonucleotide
ttaatagcttggattcagtgtt

SEQ ID NO: 1943 - DNA, 22 bp, Artificial Sequence
  Description of Artificial Sequence: Synthetic oligonucleotide
ttctttgatcaggatttcggct

SEQ ID NO: 1944 - DNA, 22 bp, Artificial Sequence
  Description of Artificial Sequence: Synthetic oligonucleotide
ttaaacttagacaaatcaggct

SEQ ID NO: 1945 - DNA, 22 bp, Artificial Sequence
  Description of Artificial Sequence: Synthetic oligonucleotide
cttgagattgtggatgtgccgc

SEQ ID NO: 1946 - DNA, 22 bp, Artificial Sequence
  Description of Artificial Sequence: Synthetic oligonucleotide
ttatcctcaggaattgtgtcca

SEQ ID NO: 1947 - DNA, 22 bp, Artificial Sequence
  Description of Artificial Sequence: Synthetic oligonucleotide
tttgtctgggagatgggtgcct

SEQ ID NO: 1948 - DNA, 22 bp, Artificial Sequence
  Description of Artificial Sequence: Synthetic oligonucleotide
taaatccaccagtttatgagaa

SEQ ID NO: 1949 - DNA, 22 bp, Artificial Sequence
  Description of Artificial Sequence: Synthetic oligonucleotide
ttgcttgtgatcatagccacgt

SEQ ID NO: 1950 - DNA, 22 bp, Artificial Sequence
  Description of Artificial Sequence: Synthetic oligonucleotide
taatcctcctctgagaacacgt

SEQ ID NO: 1951 - DNA, 22 bp, Artificial Sequence
  Description of Artificial Sequence: Synthetic oligonucleotide
atataggatctcatacacacgt

SEQ ID NO: 1952 - DNA, 22 bp, Artificial Sequence
  Description of Artificial Sequence: Synthetic oligonucleotide
tttagaagagatatcagcatgc

SEQ ID NO: 1953 - DNA, 22 bp, Artificial Sequence
  Description of Artificial Sequence: Synthetic oligonucleotide
atatctattcatcatttctgga

SEQ ID NO: 1954 - DNA, 22 bp, Artificial Sequence
  Description of Artificial Sequence: Synthetic oligonucleotide
ataatcattgaacttgattgca

SEQ ID NO: 1955 - DNA, 22 bp, Artificial Sequence
  Description of Artificial Sequence: Synthetic oligonucleotide
ttccaaaggcacaataacacca

SEQ ID NO: 1956 - DNA, 22 bp, Artificial Sequence
  Description of Artificial Sequence: Synthetic oligonucleotide
tttgtgttcagcagggtctctt

SEQ ID NO: 1957 - DNA, 22 bp, Artificial Sequence
  Description of Artificial Sequence: Synthetic oligonucleotide
atactgtccatcaatatcagct

SEQ ID NO: 1958 - DNA, 22 bp, Artificial Sequence
  Description of Artificial Sequence: Synthetic oligonucleotide
tttaggaattggtgtggctgcc

SEQ ID NO: 1959 - DNA, 22 bp, Artificial Sequence
  Description of Artificial Sequence: Synthetic oligonucleotide
ttagcatttcctataagagccc

SEQ ID NO: 1960 - DNA, 22 bp, Artificial Sequence
  Description of Artificial Sequence: Synthetic oligonucleotide
atataaagctagaagctgacca

SEQ ID NO: 1961 - DNA, 22 bp, Artificial Sequence
  Description of Artificial Sequence: Synthetic oligonucleotide
attgatatcctcagtgtgggct

SEQ ID NO: 1962 - DNA, 22 bp, Artificial Sequence
  Description of Artificial Sequence: Synthetic oligonucleotide
atatccagtgggtaaatgggca

SEQ ID NO: 1963 - DNA, 22 bp, Artificial Sequence
  Description of Artificial Sequence: Synthetic oligonucleotide
atgattcagaactgcctctctg

SEQ ID NO: 1964 - DNA, 22 bp, Artificial Sequence
  Description of Artificial Sequence: Synthetic oligonucleotide
ttaatgtaagtgctgacttcct

SEQ ID NO: 1965 - DNA, 22 bp, Artificial Sequence
  Description of Artificial Sequence: Synthetic oligonucleotide
taatttctggagccctgtacca

SEQ ID NO: 1966 - DNA, 22 bp, Artificial Sequence
  Description of Artificial Sequence: Synthetic oligonucleotide
tttatgtttccgttgatgacct

SEQ ID NO: 1967 - DNA, 22 bp, Artificial Sequence
  Description of Artificial Sequence: Synthetic oligonucleotide
aagatttatgaagagattggca

SEQ ID NO: 1968 - DNA, 22 bp, Artificial Sequence
  Description of Artificial Sequence: Synthetic oligonucleotide
ttacatggttaggatgccagga

SEQ ID NO: 1969 - DNA, 22 bp, Artificial Sequence
  Description of Artificial Sequence: Synthetic oligonucleotide
ttgaaactaaaggcgctttccg

SEQ ID NO: 1970 - DNA, 22 bp, Artificial Sequence
  Description of Artificial Sequence: Synthetic oligonucleotide
atttagaagttcctgtattcct

SEQ ID NO: 1971 - DNA, 22 bp, Artificial Sequence
  Description of Artificial Sequence: Synthetic oligonucleotide
ttatcctttagtttaggaggct

SEQ ID NO: 1972 - DNA, 22 bp, Artificial Sequence
  Description of Artificial Sequence: Synthetic oligonucleotide
ttggcagtaaatcgtgtaggcc

SEQ ID NO: 1973 - DNA, 22 bp, Artificial Sequence
  Description of Artificial Sequence: Synthetic oligonucleotide
atattcatggccaacatctggc

SEQ ID NO: 1974 - DNA, 22 bp, Artificial Sequence
  Description of Artificial Sequence: Synthetic oligonucleotide
tatgattccaacatgatatggc

SEQ ID NO: 1975 - DNA, 22 bp, Artificial Sequence
  Description of Artificial Sequence: Synthetic oligonucleotide
tttatgtaagcctctgcctgga

SEQ ID NO: 1976 - DNA, 22 bp, Artificial Sequence
  Description of Artificial Sequence: Synthetic oligonucleotide
attaaccaggatattgtctggc

SEQ ID NO: 1977 - DNA, 22 bp, Artificial Sequence
  Description of Artificial Sequence: Synthetic oligonucleotide
atgtctggaaagataaactgct

SEQ ID NO: 1978 - DNA, 22 bp, Artificial Sequence
  Description of Artificial Sequence: Synthetic oligonucleotide
ttatatgagggagagatctgcc

SEQ ID NO: 1979 - DNA, 22 bp, Artificial Sequence
  Description of Artificial Sequence: Synthetic oligonucleotide
atttgcaatgaggatttaaggc

SEQ ID NO: 1980 - DNA, 22 bp, Artificial Sequence
  Description of Artificial Sequence: Synthetic oligonucleotide
tttcaagagacaaaccagagtt

SEQ ID NO: 1981 - DNA, 22 bp, Artificial Sequence
  Description of Artificial Sequence: Synthetic oligonucleotide
ttggtgcttcaaatactagcgc

SEQ ID NO: 1982 - DNA, 22 bp, Artificial Sequence
  Description of Artificial Sequence: Synthetic oligonucleotide
attagcaacaatttcagatcga

SEQ ID NO: 1983 - DNA, 22 bp, Artificial Sequence
  Description of Artificial Sequence: Synthetic oligonucleotide
ttaatctcttaatggtacaggt

SEQ ID NO: 1984 - DNA, 22 bp, Artificial Sequence
  Description of Artificial Sequence: Synthetic oligonucleotide
tttggaaactgcttaatgccgc

SEQ ID NO: 1985 - DNA, 22 bp, Artificial Sequence
  Description of Artificial Sequence: Synthetic oligonucleotide
tttgtagacatcctggagaggc

SEQ ID NO: 1986 - DNA, 22 bp, Artificial Sequence
  Description of Artificial Sequence: Synthetic oligonucleotide
tattactattaagccacttccc

SEQ ID NO: 1987 - DNA, 22 bp, Artificial Sequence
  Description of Artificial Sequence: Synthetic oligonucleotide
atatgagtaaactttctggcca

SEQ ID NO: 1988 - DNA, 22 bp, Artificial Sequence
  Description of Artificial Sequence: Synthetic oligonucleotide
ttgttaaaggaaacatccaggg

SEQ ID NO: 1989 - DNA, 22 bp, Artificial Sequence
  Description of Artificial Sequence: Synthetic oligonucleotide
ttagtgaatgatattgttagcc

SEQ ID NO: 1990 - DNA, 22 bp, Artificial Sequence
  Description of Artificial Sequence: Synthetic oligonucleotide
atatctaacattccaaacacca

SEQ ID NO: 1991 - DNA, 22 bp, Artificial Sequence
  Description of Artificial Sequence: Synthetic oligonucleotide
taacaataaggttgtagtcctc

SEQ ID NO: 1992 - DNA, 22 bp, Artificial Sequence
  Description of Artificial Sequence: Synthetic oligonucleotide
tttattatgtattcggagtcct

SEQ ID NO: 1993 - DNA, 22 bp, Artificial Sequence
  Description of Artificial Sequence: Synthetic oligonucleotide
tttgatgatctgtattgtccct

SEQ ID NO: 1994 - DNA, 22 bp, Artificial Sequence
  Description of Artificial Sequence: Synthetic oligonucleotide
taaagttaacgtgttggaggcc

SEQ ID NO: 1995 - DNA, 22 bp, Artificial Sequence
  Description of Artificial Sequence: Synthetic oligonucleotide
atacgttctctttctacgacga

SEQ ID NO: 1996 - DNA, 22 bp, Artificial Sequence
  Description of Artificial Sequence: Synthetic oligonucleotide
atttgactgggcgtggtgtgct

SEQ ID NO: 1997 - DNA, 22 bp, Artificial Sequence
  Description of Artificial Sequence: Synthetic oligonucleotide
ttatttcttgaatccatgaccc

SEQ ID NO: 1998 - DNA, 22 bp, Artificial Sequence
  Description of Artificial Sequence: Synthetic oligonucleotide
ataactgtagttactctgtcca

SEQ ID NO: 1999 - DNA, 22 bp, Artificial Sequence
  Description of Artificial Sequence: Synthetic oligonucleotide
tttgtaaaggcagagggcaccc

SEQ ID NO: 2000 - DNA, 22 bp, Artificial Sequence
  Description of Artificial Sequence: Synthetic oligonucleotide
gttcacaaaggctgcggctggg

SEQ ID NO: 2001 - DNA, 22 bp, Artificial Sequence
  Description of Artificial Sequence: Synthetic oligonucleotide
tttcatatctatactctgaccc

SEQ ID NO: 2002 - DNA, 22 bp, Artificial Sequence
  Description of Artificial Sequence: Synthetic oligonucleotide
taagtgtattctgtcagtccct

SEQ ID NO: 2003 - DNA, 22 bp, Artificial Sequence
  Description of Artificial Sequence: Synthetic oligonucleotide
tttgtttacagcatccatcgct

SEQ ID NO: 2004 - DNA, 22 bp, Artificial Sequence
  Description of Artificial Sequence: Synthetic oligonucleotide
taattcaaacatctgtacactt

SEQ ID NO: 2005 - DNA, 22 bp, Artificial Sequence
  Description of Artificial Sequence: Synthetic oligonucleotide
ataggcatccatatcctgggca

SEQ ID NO: 2006 - DNA, 22 bp, Artificial Sequence
  Description of Artificial Sequence: Synthetic oligonucleotide
atgagtaatggaggtgtcccgt

SEQ ID NO: 2007 - DNA, 22 bp, Artificial Sequence
  Description of Artificial Sequence: Synthetic oligonucleotide
ttatacttcatcctcgcctctc

SEQ ID NO: 2008 - DNA, 22 bp, Artificial Sequence
  Description of Artificial Sequence: Synthetic oligonucleotide
atataaagctagaagctgacca

SEQ ID NO: 2009 - DNA, 22 bp, Artificial Sequence
  Description of Artificial Sequence: Synthetic oligonucleotide
attaacaattcatctgatgccg

SEQ ID NO: 2010 - DNA, 22 bp, Artificial Sequence
  Description of Artificial Sequence: Synthetic oligonucleotide
atactcttcaatgtgggctgcc

SEQ ID NO: 2011 - DNA, 22 bp, Artificial Sequence
  Description of Artificial Sequence: Synthetic oligonucleotide
tttcattacattctttgcacct

SEQ ID NO: 2012 - DNA, 22 bp, Artificial Sequence
  Description of Artificial Sequence: Synthetic oligonucleotide
aatgattcagactttcactgga

SEQ ID NO: 2013 - DNA, 22 bp, Artificial Sequence
  Description of Artificial Sequence: Synthetic oligonucleotide
tttcacttaattcctactccct

SEQ ID NO: 2014 - DNA, 22 bp, Artificial Sequence
  Description of Artificial Sequence: Synthetic oligonucleotide
catgatattcagataccagcca

SEQ ID NO: 2015 - DNA, 22 bp, Artificial Sequence
  Description of Artificial Sequence: Synthetic oligonucleotide
ttctcatcaaagaactccactc

SEQ ID NO: 2016 - DNA, 22 bp, Artificial Sequence
  Description of Artificial Sequence: Synthetic oligonucleotide
attcctatttaaatgccgcccg

SEQ ID NO: 2017 - DNA, 22 bp, Artificial Sequence
  Description of Artificial Sequence: Synthetic oligonucleotide
atcactttgcatatagtcccat

SEQ ID NO: 2018 - DNA, 22 bp, Artificial Sequence
  Description of Artificial Sequence: Synthetic oligonucleotide
aattcacatcagagctggcggc

SEQ ID NO: 2019 - DNA, 22 bp, Artificial Sequence
  Description of Artificial Sequence: Synthetic oligonucleotide
tattgctccacaatgaagtcct

SEQ ID NO: 2020 - DNA, 22 bp, Artificial Sequence
  Description of Artificial Sequence: Synthetic oligonucleotide
tatagacatgacaaagcatcga

SEQ ID NO: 2021 - DNA, 22 bp, Artificial Sequence
  Description of Artificial Sequence: Synthetic oligonucleotide
ttatctaaagcattcataacca

SEQ ID NO: 2022 - DNA, 22 bp, Artificial Sequence
  Description of Artificial Sequence: Synthetic oligonucleotide
ttatcctccaagtagctcaggg

SEQ ID NO: 2023 - DNA, 22 bp, Artificial Sequence
  Description of Artificial Sequence: Synthetic oligonucleotide
ttataccgaaatactgttgcca

SEQ ID NO: 2024 - DNA, 22 bp, Artificial Sequence
  Description of Artificial Sequence: Synthetic oligonucleotide
tttagttctctccttggcagcg

SEQ ID NO: 2025 - DNA, 22 bp, Artificial Sequence
  Description of Artificial Sequence: Synthetic oligonucleotide
tatcctgcagcagcaccagggc

SEQ ID NO: 2026 - DNA, 22 bp, Artificial Sequence
  Description of Artificial Sequence: Synthetic oligonucleotide
tttatgtttccgttgatgacct

SEQ ID NO: 2027 - DNA, 22 bp, Artificial Sequence
  Description of Artificial Sequence: Synthetic oligonucleotide
tattctgtacaattcatatggt

SEQ ID NO: 2028 - DNA, 22 bp, Artificial Sequence
  Description of Artificial Sequence: Synthetic oligonucleotide
attgctttgaggtggcagggtt

SEQ ID NO: 2029 - DNA, 22 bp, Artificial Sequence
  Description of Artificial Sequence: Synthetic oligonucleotide
tttgtctgggagatgggtgcct

SEQ ID NO: 2030 - DNA, 22 bp, Artificial Sequence
  Description of Artificial Sequence: Synthetic oligonucleotide
attaaatcccatagcatgactg

SEQ ID NO: 2031 - DNA, 22 bp, Artificial Sequence
  Description of Artificial Sequence: Synthetic oligonucleotide
tttagcaagcaagttggccggg

SEQ ID NO: 2032 - DNA, 22 bp, Artificial Sequence
  Description of Artificial Sequence: Synthetic oligonucleotide
atgaagtgagacaatgctggcc

SEQ ID NO: 2033 - DNA, 22 bp, Artificial Sequence
  Description of Artificial Sequence: Synthetic oligonucleotide
ttgacctatggcactgactgga

SEQ ID NO: 2034 - DNA, 22 bp, Artificial Sequence
  Description of Artificial Sequence: Synthetic oligonucleotide
ttgctgctggagcctggatggg

SEQ ID NO: 2035 - DNA, 22 bp, Artificial Sequence
  Description of Artificial Sequence: Synthetic oligonucleotide
ttaggtgttgtgttgagtggct

SEQ ID NO: 2036 - DNA, 22 bp, Artificial Sequence
  Description of Artificial Sequence: Synthetic oligonucleotide
tttctggctcagaaatggcggc

SEQ ID NO: 2037 - DNA, 22 bp, Artificial Sequence
  Description of Artificial Sequence: Synthetic oligonucleotide
ttaaagtgaaacgttccatggg

SEQ ID NO: 2038 - DNA, 22 bp, Artificial Sequence
  Description of Artificial Sequence: Synthetic oligonucleotide
caatgtagaaattggcacccgc

SEQ ID NO: 2039 - DNA, 22 bp, Artificial Sequence
  Description of Artificial Sequence: Synthetic oligonucleotide
ttattgatcagctccttggcct

SEQ ID NO: 2040 - DNA, 22 bp, Artificial Sequence
  Description of Artificial Sequence: Synthetic oligonucleotide
taatgcatttacttattctccc

SEQ ID NO: 2041 - DNA, 22 bp, Artificial Sequence
  Description of Artificial Sequence: Synthetic oligonucleotide
attgatatcctcagtgtgggct

SEQ ID NO: 2042 - DNA, 22 bp, Artificial Sequence
  Description of Artificial Sequence: Synthetic oligonucleotide
tatttgtcggcggcagagagcc

SEQ ID NO: 2043 - DNA, 22 bp, Artificial Sequence
  Description of Artificial Sequence: Synthetic oligonucleotide
tttcttcaacccatcttgggcc

SEQ ID NO: 2044 - DNA, 22 bp, Artificial Sequence
  Description of Artificial Sequence: Synthetic oligonucleotide
tagggcaagatctccacagggc

SEQ ID NO: 2045 - DNA, 22 bp, Artificial Sequence
  Description of Artificial Sequence: Synthetic oligonucleotide
ttcacattgaccttgaagcgcc

SEQ ID NO: 2046 - DNA, 22 bp, Artificial Sequence
  Description of Artificial Sequence: Synthetic oligonucleotide
atgattcagaactgcctctctg

SEQ ID NO: 2047 - DNA, 22 bp, Artificial Sequence
  Description of Artificial Sequence: Synthetic oligonucleotide
tttgacttctcaatggtgtcca

SEQ ID NO: 2048 - DNA, 22 bp, Artificial Sequence
  Description of Artificial Sequence: Synthetic oligonucleotide
ttctttgtggactccaggtggc

SEQ ID NO: 2049 - DNA, 22 bp, Artificial Sequence
  Description of Artificial Sequence: Synthetic oligonucleotide
ttaatgtaagtgctgacttcct

SEQ ID NO: 2050 - DNA, 22 bp, Artificial Sequence
  Description of Artificial Sequence: Synthetic oligonucleotide
aattgtttccactgtggtccct

SEQ ID NO: 2051 - DNA, 22 bp, Artificial Sequence
  Description of Artificial Sequence: Synthetic oligonucleotide
tttaggaattggtgtggctgcc

SEQ ID NO: 2052 - DNA, 22 bp, Artificial Sequence
  Description of Artificial Sequence: Synthetic oligonucleotide
attgagctccagtctctgtccc

SEQ ID NO: 2053 - DNA, 22 bp, Artificial Sequence
  Description of Artificial Sequence: Synthetic oligonucleotide
taatttctggagccctgtacca

SEQ ID NO: 2054 - DNA, 22 bp, Artificial Sequence
  Description of Artificial Sequence: Synthetic oligonucleotide
tatcgttctcaactggcaagct

SEQ ID NO: 2055 - DNA, 22 bp, Artificial Sequence
  Description of Artificial Sequence: Synthetic oligonucleotide
ttgaggatggtgttgatctccc

SEQ ID NO: 2056 - DNA, 22 bp, Artificial Sequence
  Description of Artificial Sequence: Synthetic oligonucleotide
gtaacttacaataggagccgcc

SEQ ID NO: 2057 - DNA, 22 bp, Artificial Sequence
  Description of Artificial Sequence: Synthetic oligonucleotide
tatgggtgaaacaggcatgcgt

SEQ ID NO: 2058 - DNA, 22 bp, Artificial Sequence
  Description of Artificial Sequence: Synthetic oligonucleotide
atcctacgacgtgctgctgggc

SEQ ID NO: 2059 - DNA, 22 bp, Artificial Sequence
  Description of Artificial Sequence: Synthetic oligonucleotide
tttcatagggataaacaatgcg

SEQ ID NO: 2060 - DNA, 22 bp, Artificial Sequence
  Description of Artificial Sequence: Synthetic oligonucleotide
ctcaatgaagatacgctcagcc

SEQ ID NO: 2061 - DNA, 22 bp, Artificial Sequence
  Description of Artificial Sequence: Synthetic oligonucleotide
ttatattcttcctgctcccgga

SEQ ID NO: 2062 - DNA, 22 bp, Artificial Sequence
  Description of Artificial Sequence: Synthetic oligonucleotide
atatgactcaataaactgggca

SEQ ID NO: 2063 - DNA, 22 bp, Artificial Sequence
  Description of Artificial Sequence: Synthetic oligonucleotide
ttgatctgggatgttaataccc

SEQ ID NO: 2064 - DNA, 22 bp, Artificial Sequence
  Description of Artificial Sequence: Synthetic oligonucleotide
ttactgtacaactggaatgccc

SEQ ID NO: 2065 - DNA, 22 bp, Artificial Sequence
  Description of Artificial Sequence: Synthetic oligonucleotide
atcatcgacaatatagccaggt

SEQ ID NO: 2066 - DNA, 22 bp, Artificial Sequence
  Description of Artificial Sequence: Synthetic oligonucleotide
tttagcttcattatcttctgct

SEQ ID NO: 2067 - DNA, 22 bp, Artificial Sequence
  Description of Artificial Sequence: Synthetic oligonucleotide
atgacattgaggactttctccc

SEQ ID NO: 2068 - DNA, 22 bp, Artificial Sequence
  Description of Artificial Sequence: Synthetic oligonucleotide
tttctgtaacactttgctaccc

SEQ ID NO: 2069 - DNA, 22 bp, Artificial Sequence
  Description of Artificial Sequence: Synthetic oligonucleotide
tttggacagcaccttcattgca

SEQ ID NO: 2070 - DNA, 22 bp, Artificial Sequence
  Description of Artificial Sequence: Synthetic oligonucleotide
ttgttctctagaagtccctggt

SEQ ID NO: 2071 - DNA, 22 bp, Artificial Sequence
  Description of Artificial Sequence: Synthetic oligonucleotide
aacaaatccaggtcccagtgcc

SEQ ID NO: 2072 - DNA, 22 bp, Artificial Sequence
  Description of Artificial Sequence: Synthetic oligonucleotide
ttggcagtaaatcgtgtaggcc

SEQ ID NO: 2073 - DNA, 22 bp, Artificial Sequence
  Description of Artificial Sequence: Synthetic oligonucleotide
aatctcaagaacttggtctccc

SEQ ID NO: 2074 - DNA, 22 bp, Artificial Sequence
  Description of Artificial Sequence: Synthetic oligonucleotide
tatgcctacaagactatttggc

SEQ ID NO: 2075 - DNA, 22 bp, Artificial Sequence
  Description of Artificial Sequence: Synthetic oligonucleotide
taagctgtgcgaagggctcggg

SEQ ID NO: 2076 - DNA, 22 bp, Artificial Sequence
  Description of Artificial Sequence: Synthetic oligonucleotide
taatcagcagaaacggcagcgt

SEQ ID NO: 2077 - DNA, 22 bp, Artificial Sequence
  Description of Artificial Sequence: Synthetic oligonucleotide
ttcaggttccagatgtggcgga

SEQ ID NO: 2078 - DNA, 22 bp, Artificial Sequence
  Description of Artificial Sequence: Synthetic oligonucleotide
ttagagcttcattcactgtcca

SEQ ID NO: 2079 - DNA, 22 bp, Artificial Sequence
  Description of Artificial Sequence: Synthetic oligonucleotide
atagggtccgaaggtcaggcgg

SEQ ID NO: 2080 - DNA, 22 bp, Artificial Sequence
  Description of Artificial Sequence: Synthetic oligonucleotide
gtagtagaagtcgtaggtgcgc

SEQ ID NO: 2081 - DNA, 22 bp, Artificial Sequence
  Description of Artificial Sequence: Synthetic oligonucleotide
attgcttcagacagggtgtcgc

SEQ ID NO: 2082 - DNA, 22 bp, Artificial Sequence
  Description of Artificial Sequence: Synthetic oligonucleotide
taattcttcctctgggtctcgt

SEQ ID NO: 2083 - protein, 92 aa, Artificial Sequence
  Description of Artificial Sequence: Synthetic polypeptide
ELSPGLKCVCLLCDSSNFTCQTEGACWASVMLTNGKEQVIKSCVSLPELNAQVFCHSSNNVTKTECCFTDFCNNITLHLPTASPNAPKLGPM

SEQ ID NO: 2084 - protein, 100 aa, Artificial Sequence
  Description of Artificial Sequence: Synthetic polypeptide
VVLKDTVGREGRDRLLVQLPLSLVYNSEDSAEYQFTGTYSTRLDEQCSAIPTRTMHFEKHWRLLESMKAQYVAGNGFRKVSCVLSSNLRHVRVFEMDIDD

SEQ ID NO: 2085 - protein, 230 aa, Artificial Sequence
  Description of Artificial Sequence: Synthetic polypeptide
QKMIDELHKKLHQVVETSHEDLPASQERSEVNPARMGPSVGSQQELRAPCLPVTYQQTPVNMEKNPREAPPVVPPLANAISAALVSPATSQSIAPPVPLKAQTVTDSMFAVASKDAGCVNKSTHEFKPQSMASASYHISNLLEKMTSSDKDFRFMATNDLMTELQKDSIKLDDDSERKVVKMILKLLEDKNGEVQNLAVKCLGPLVSKVKEYQVETIVDTLCTNMLSDKE

SEQ ID NO: 2086 - protein, 101 aa, Artificial Sequence
  Description of Artificial Sequence: Synthetic polypeptide
LGPLVSKVKEYQVETIVDTLCTNMLSDKEQLRDISSIGLKTVIGELPPASSGSALAANVCKKITGRLTSAIAKQEDVSVQLEALDIMADMLSRQGGLLVNF

SEQ ID NO: 2087 - protein, 99 aa, Artificial Sequence
  Description of Artificial Sequence: Synthetic polypeptide
SRVQLSGPQEAEKYVLHMIEDGEIFASINQKDGMVSFHDNPEKYNNPAMLHNIDQEMLKCIELDERLKAMDQEITVNPQFVQKSMGSQEDDSGNKPSSY

SEQ ID NO: 2088 - protein, 100 aa, Artificial Sequence
  Description of Artificial Sequence: Synthetic polypeptide
KFILLFAVFDEGKSWHSETKNSLMQDRDAASARAWPKMHTVNGYVNRSLPGLIGCHRKSVYWHVIGMGTTPEVHSIFLEGHTFLVRNHRQASLEISPITF

SEQ ID NO: 2089 - protein, 14 aa, Artificial Sequence
  Description of Artificial Sequence: Synthetic peptide
NRNYWEKKQEEARK

SEQ ID NO: 2090 - protein, 106 aa, Artificial Sequence
  Description of Artificial Sequence: Synthetic polypeptide
YLATLETLTKHYGAEIFETSMLLISSENEMNWFHSNDGGNVLYYEVMVTGNLGIQWRHKPNVVSVEKEKNKLKRKKLENKHKKDEEKNKIREEWNNFSYFPEITHI

SEQ ID NO: 2091 - protein, 100 aa, Artificial Sequence
  Description of Artificial Sequence: Synthetic polypeptide
VPVIVSNFNYFYHRETEGEEQSQYMHVGSCQHLSSSAEELRKARSNSTLSKSEYMVIEEGGMNHSAFPQTPFKTGNSTATCTTNNNPNSCVNIKKIFTDV

SEQ ID NO: 2092 - protein, 100 aa, Artificial Sequence
  Description of Artificial Sequence: Synthetic polypeptide
VLVNGGLTPPKSEDKVSENGGLRFPRNTERPPETGPWRAPGPWEKTPESWGPAPTIGEPAPETSLERAPAPSAVVSSRNGGETAPGPLGPAPKNGTLEPG

SEQ ID NO: 2093 - protein, 100 aa, Artificial Sequence
  Description of Artificial Sequence: Synthetic polypeptide
VHPALQRPAEPQVQWSHLASLKNNVSPVSRSHSFSDPSPKFAHHHLRSQDPCPPSRSEVLSQSSDSKSEAPDPTQKAWSRSDSDEVPPRVPVRTTSRSPV

SEQ ID NO: 2094 - protein, 13 aa, Artificial Sequence
  Description of Artificial Sequence: Synthetic peptide
CAAGPEMVRGQVF

SEQ ID NO: 2095 - protein, 101 aa, Artificial Sequence
  Description of Artificial Sequence: Synthetic polypeptide
PANSQPSRRGRWGRKNRKTQERFGDKDSKLLLEETSSAPQEQYGECGEKSEATQEQYTESEEQLVASEEQPSQDGKPDLPKRRLSEGVEPWRGQLKKSPEA

SEQ ID NO: 2096 - protein, 17 aa, Artificial Sequence
  Description of Artificial Sequence: Synthetic peptide
MEDPSEPDRLASADGGS

SEQ ID NO: 2097 - protein, 10 aa, Artificial Sequence
  Description of Artificial Sequence: Synthetic peptide
GERKKTLCGT

SEQ ID NO: 2098 - protein, 41 aa, Artificial Sequence
  Description of Artificial Sequence: Synthetic polypeptide
HSHGGDMSNRPVCRHFMMKGNCRYENNCAFYHPGVNGPPLP

SEQ ID NO: 2099 - protein, 11 aa, Artificial Sequence
  Description of Artificial Sequence: Synthetic peptide
SYTNPEFVINV

SEQ ID NO: 2100 - protein, 90 aa, Artificial Sequence
  Description of Artificial Sequence: Synthetic polypeptide
WRMIWEWKSHTIVMLTEVQEREQDKCYQYWPTEGSVTHGEITIEIKNDTLSEAISIRDFLVTLNQPQARQEEQVRVVRQFHFHGWPEIGI

SEQ ID NO: 2101 - protein, 130 aa, Artificial Sequence
  Description of Artificial Sequence: Synthetic polypeptide
MEHIQGAWKTISNGFGFKDAVFDGSSCISPTIVQQFGYQRRASDDGKLTDPSKTSNTIRVFLPNKQRTVVNVRNGMSLHDCLMKALKVRGLQPECCAVFRLLHEHKGKKARLDWNTDAASLIGEELQVDF

SEQ ID NO: 2102 - protein, 100 aa, Artificial Sequence
  Description of Artificial Sequence: Synthetic polypeptide
RVESSRRAVSQIVTVYDKLQEKVELLSRKLNSGDNLIVEEAVQELNSFLAQENMRLQELTDLLQEKHRTMSQEFSKLQSKVETAESRVSVLESMIDDLQW

SEQ ID NO: 2103 - protein, 17 aa, Artificial Sequence
  Description of Artificial Sequence: Synthetic peptide
CKRKEFDTNGWQLFSKK

SEQ ID NO: 2104 - protein, 17 aa, Artificial Sequence
  Description of Artificial Sequence: Synthetic peptide
SLLDPPSWLNDHIIGFA

SEQ ID NO: 2105 - protein, 98 aa, Artificial Sequence
  Description of Artificial Sequence: Synthetic polypeptide
MAGGGGDLSTRRLNECISPVANEMNHLPAHSHDLQRMFTEDQGVDDRLLYDIVFKHFKRNKVEISNAIKKTFPFLEGLRDRDLITNKMFEDSQDSCRN

SEQ ID NO: 2106 - protein, 69 aa, Artificial Sequence
  Description of Artificial Sequence: Synthetic polypeptide
PILASQNTKIIDSELSDGIAMLVAGNDRVQAVITQMEEVCQTIEDNSRRQKQLLNQRFESLCAVLEERK

SEQ ID NO: 2107 - protein, 100 aa, Artificial Sequence
  Description of Artificial Sequence: Synthetic polypeptide
EERELSVRAALASAHQCHPLPRTLSVLKSTPQVRGMHTIIRDKETSRDEFIFYSKRLMRLLIEHALSFLPFQDCVVQTPQGQDYAGKCYAGKQITGVSIL

SEQ ID NO: 2108 - protein, 16 aa, Artificial Sequence
  Description of Artificial Sequence: Synthetic peptide
QADEEKHKRQMSVPGS

SEQ ID NO: 2109 - protein, 100 aa, Artificial Sequence
  Description of Artificial Sequence: Synthetic polypeptide
MLGNSAPGPATREAGSALLALQQTALQEDQENINPEKAAPVQQPRTRAALAVLKSGNPRGLAQQQRPKTRRVAPLKDLPVNDEHVTVPPWKANSKQPAFT

SEQ ID NO: 2110 - protein, 75 aa, Artificial Sequence
  Description of Artificial Sequence: Synthetic polypeptide
KNLDYKRDLFCLSVEAIESYVLGSSEKQIVSEDKELFNLESRVEIEKSLTQMEDVLKALQMKLWEAESKLSFATC

SEQ ID NO: 2111 - protein, 51 aa, Artificial Sequence
  Description of Artificial Sequence: Synthetic polypeptide
ETNSRESKGNDITIYGNDFMDLTFNGTLQILPATGNFSEIENQTQNAMDVT

SEQ ID NO: 2112 - protein, 100 aa, Artificial Sequence
  Description of Artificial Sequence: Synthetic polypeptide
MAMDSSLQARLFPGLAIKIQRSNGLIHSANVRTVNLEKSCVSVEWAEGGATKGKEIDFDDVAAINPELLQLLPLHPKDNLPLQENVTIQKQKRRSVNSKI

SEQ ID NO: 2113 - protein, 10 aa, Artificial Sequence
  Description of Artificial Sequence: Synthetic peptide
  MOD_RES (5)..(5): Phosphorylated-Ser
SHNQSPKRHS

SEQ ID NO: 2114 - protein, 100 aa, Artificial Sequence; identical to SEQ ID NO: 2084
  Description of Artificial Sequence: Synthetic polypeptide

SEQ ID NO: 2115 - protein, 14 aa, Artificial Sequence
  Description of Artificial Sequence: Synthetic peptide
EETGLTPLETSRKT

SEQ ID NO: 2116 - protein, 11 aa, Artificial Sequence
  Description of Artificial Sequence: Synthetic peptide
VISPDTVPLGT

SEQ ID NO: 2117 - protein, 139 aa, Artificial Sequence
  Description of Artificial Sequence: Synthetic polypeptide
DTLVADNLDQATRVAYQKDRRWRVVTLQGQIIEQSGTMTGGGSKVMKGRMGSSLVIEISEEEVNKMESQLQNDSKKAMQIQEQKVQLEERVVKLRHSEREMRNTLEKFTASIQRLIEQEEYLNVQVKELEANVLATAPD

SEQ ID NO: 2118 - protein, 110 aa, Artificial Sequence
  Description of Artificial Sequence: Synthetic polypeptide
AMSRPFGVALLFGGVDEKGPQLFHMDPSGTFVQCDARAIGSASEGAQSSLQEVYHKSMTLKEAIKSSLIILKQVMEEKLNATNIELATVQPGQNFHMFTKEELEEVIKDI

SEQ ID NO: 2119 - RNA, 22 nt, Artificial Sequence
  Description of Artificial Sequence: Synthetic oligonucleotide
accacuaaguguuucuuuaggu

SEQ ID NO: 2120 - RNA, 22 nt, Artificial Sequence
  Description of Artificial Sequence: Synthetic oligonucleotide
agugguaacgauuucacguuaa

SEQ ID NO: 2121 - RNA, 21 nt, Artificial Sequence
  Description of Artificial Sequence: Synthetic oligonucleotide
uacauccggaaaucuagugaa

SEQ ID NO: 2122 - RNA, 22 nt, Artificial Sequence
  Description of Artificial Sequence: Synthetic oligonucleotide
uucuacaccugguauaauguau

SEQ ID NO: 2123 - RNA, 23 nt, Artificial Sequence
  Description of Artificial Sequence: Synthetic oligonucleotide
uuuagucuuaguguggacccccu

SEQ ID NO: 2124 - RNA, 22 nt, Artificial Sequence
  Description of Artificial Sequence: Synthetic oligonucleotide
auaaguccuuguauaacguuuu

SEQ ID NO: 2125 - RNA, 21 nt, Artificial Sequence
  Description of Artificial Sequence: Synthetic oligonucleotide
uuuccgguguaggucguggca

SEQ ID NO: 2126 - RNA, 23 nt, Artificial Sequence
  Description of Artificial Sequence: Synthetic oligonucleotide
cguuagucgauugaugugacgga

SEQ ID NO: 2127 - RNA, 21 nt, Artificial Sequence
  Description of Artificial Sequence: Synthetic oligonucleotide
uccucugaguguucaaggacg

SEQ ID NO: 2128 - RNA, 23 nt, Artificial Sequence
  Description of Artificial Sequence: Synthetic oligonucleotide
agguauuucauccuuugugaugu

SEQ ID NO: 2129 - RNA, 23 nt, Artificial Sequence
  Description of Artificial Sequence: Synthetic oligonucleotide
uacguuucaacgagcccauugga

SEQ ID NO: 2130 - RNA, 26 nt, Artificial Sequence
  Description of Artificial Sequence: Synthetic oligonucleotide
aaagucuuaaacgacgguaguaguag

SEQ ID NO: 2131 - RNA, 23 nt, Artificial Sequence
  Description of Artificial Sequence: Synthetic oligonucleotide
gacgucuugacaagggcgacgau

SEQ ID NO: 2132 - RNA, 22 nt, Artificial Sequence
  Description of Artificial Sequence: Synthetic oligonucleotide
uuucacgaagaauggaggucua

SEQ ID NO: 2133 - RNA, 24 nt, Artificial Sequence
  Description of Artificial Sequence: Synthetic oligonucleotide
gacuagucaauguguagugaaguc

SEQ ID NO: 2134 - RNA, 23 nt, Artificial Sequence
  Description of Artificial Sequence: Synthetic oligonucleotide
agguaguaguuuuguuuaccuca

SEQ ID NO: 2135 - RNA, 21 nt, Artificial Sequence
  Description of Artificial Sequence: Synthetic oligonucleotide
cgguuauaaagacacgacgau

SEQ ID NO: 2136 - RNA, 21 nt, Artificial Sequence
  Description of Artificial Sequence: Synthetic oligonucleotide
aaaaccacguauaaaugaaau

SEQ ID NO: 2137 - RNA, 22 nt, Artificial Sequence
  Description of Artificial Sequence: Synthetic oligonucleotide
ucagaaguguugucgggacaca

SEQ ID NO: 2138 - RNA, 22 nt, Artificial Sequence
  Description of Artificial Sequence: Synthetic oligonucleotide
ugggaauagucaagaggcaggu

SEQ ID NO: 2139 - RNA, 21 nt, Artificial Sequence
  Description of Artificial Sequence: Synthetic oligonucleotide
gucaucucuaacaaaguugug

SEQ ID NO: 2140 - RNA, 23 nt, Artificial Sequence
  Description of Artificial Sequence: Synthetic oligonucleotide
uccucuuccgugguacccuaaau

SEQ ID NO: 2141 - RNA, 21 nt, Artificial Sequence
  Description of Artificial Sequence: Synthetic oligonucleotide
gggcuccucggcccguccgaa

SEQ ID NO: 2142 - RNA, 23 nt, Artificial Sequence
  Description of Artificial Sequence: Synthetic oligonucleotide
cccucacuucugugccucggucu

SEQ ID NO: 2143 - RNA, 21 nt, Artificial Sequence
  Description of Artificial Sequence: Synthetic oligonucleotide
acguuugggacguacacccuc

SEQ ID NO: 2144 - RNA, 24 nt, Artificial Sequence
  Description of Artificial Sequence: Synthetic oligonucleotide
acccucuuggagggacgaagacga

SEQ ID NO: 2145 - RNA, 21 nt, Artificial Sequence
  Description of Artificial Sequence: Synthetic oligonucleotide
uuucucuggccaagugacacu

SEQ ID NO: 2146 - RNA, 22 nt, Artificial Sequence
  Description of Artificial Sequence: Synthetic oligonucleotide
uauuuacuguggaggaacacuu

SEQ ID NO: 2147 - RNA, 23 nt, Artificial Sequence
  Description of Artificial Sequence: Synthetic oligonucleotide
ucguuuuuacacgaucacgguuu

SEQ ID NO: 2148 - RNA, 23 nt, Artificial Sequence
  Description of Artificial Sequence: Synthetic oligonucleotide
ggcgaacucgauugaggcugggc

SEQ ID NO: 2149 - RNA, 24 nt, Artificial Sequence
  Description of Artificial Sequence: Synthetic oligonucleotide
cuccacugagauaggauacagaaa

SEQ ID NO: 2150 - RNA, 22 nt, Artificial Sequence
  Description of Artificial Sequence: Synthetic oligonucleotide
ugguuucuggcguuaaugaaaa

SEQ ID NO: 2151 - RNA, 19 nt, Artificial Sequence
  Description of Artificial Sequence: Synthetic oligonucleotide
ggacgagguuuuuagguaa

SEQ ID NO: 2152 - RNA, 23 nt, Artificial Sequence
  Description of Artificial Sequence: Synthetic oligonucleotide
ugaguggcugucgcaacuuacaa

SEQ ID NO: 2153 - RNA, 23 nt, Artificial Sequence
  Description of Artificial Sequence: Synthetic oligonucleotide
aguaugucguacuauugguuucu

SEQ ID NO: 2154 - RNA, 21 nt, Artificial Sequence
  Description of Artificial Sequence: Synthetic oligonucleotide
uggauaggacuuaaugaacuu

SEQ ID NO: 2155 - RNA, 24 nt, Artificial Sequence
  Description of Artificial Sequence: Synthetic oligonucleotide
cuuucacguaucuuaagacagacc

SEQ ID NO: 2156 - RNA, 22 nt, Artificial Sequence
  Description of Artificial Sequence: Synthetic oligonucleotide
aucgucuucguaaaggcgugug

SEQ ID NO: 2157 - RNA, 22 nt, Artificial Sequence
  Description of Artificial Sequence: Synthetic oligonucleotide
agugguaacgauuucacguuaa

SEQ ID NO: 2158 - RNA, 22 nt, Artificial Sequence
  Description of Artificial Sequence: Synthetic oligonucleotide
ucgguguuaguggaagacuaga

SEQ ID NO: 2159 - RNA, 23 nt, Artificial Sequence
  Description of Artificial Sequence: Synthetic oligonucleotide
ucccuaaggacccuuuugaccug

SEQ ID NO: 2160 - RNA, 20 nt, Artificial Sequence
  Description of Artificial Sequence: Synthetic oligonucleotide
gaccuccuucccgggucucc

SEQ ID NO: 2161 - RNA, 23 nt, Artificial Sequence
  Description of Artificial Sequence: Synthetic oligonucleotide
gauggacgugacauucgugaaaa

SEQ ID NO: 2162 - RNA, 27 nt, Artificial Sequence
  Description of Artificial Sequence: Synthetic oligonucleotide
acgggugagagugguaguggaugucac

SEQ ID NO: 2163 - RNA, 22 nt, Artificial Sequence
  Description of Artificial Sequence: Synthetic oligonucleotide
ugaguggcuguccaacuuacaa

SEQ ID NO: 2164 - RNA, 22 nt, Artificial Sequence
  Description of Artificial Sequence: Synthetic oligonucleotide
cguguuuagaggucuggugggu

SEQ ID NO: 2165 - RNA, 22 nt, Artificial Sequence
  Description of Artificial Sequence: Synthetic oligonucleotide
aguaguaaugguccgucauaau

SEQ ID NO: 2166 - RNA, 22 nt, Artificial Sequence
  Description of Artificial Sequence: Synthetic oligonucleotide
guguaccgguuuugucucuucu

SEQ ID NO: 2167 - RNA, 19 nt, Artificial Sequence
  Description of Artificial Sequence: Synthetic oligonucleotide
uucgguuucggaauaggua

SEQ ID NO: 2168 - RNA, 21 nt, Artificial Sequence
  Description of Artificial Sequence: Synthetic oligonucleotide
uggauaggacuuaaugaacuu

SEQ ID NO: 2169 - RNA, 22 nt, Artificial Sequence
  Description of Artificial Sequence: Synthetic oligonucleotide
uuagucagaguaacgaaauauu

SEQ ID NO: 2170 - RNA, 20 nt, Artificial Sequence
  Description of Artificial Sequence: Synthetic oligonucleotide
aggggugucugggucucggc

SEQ ID NO: 2171 - RNA, 21 nt, Artificial Sequence
  Description of Artificial Sequence: Synthetic oligonucleotide
uguccgguagacacaauauaa

SEQ ID NO: 2172 - RNA, 22 nt, Artificial Sequence
  Description of Artificial Sequence: Synthetic oligonucleotide
ucucguucuggggcagagauuu

SEQ ID NO: 2173 - RNA, 23 nt, Artificial Sequence
  Description of Artificial Sequence: Synthetic oligonucleotide
aguaugucgaucuauugguuucu

SEQ ID NO: 2174 - RNA, 21 nt, Artificial Sequence
  Description of Artificial Sequence: Synthetic oligonucleotide
agaugagucuucccacggaau

SEQ ID NO: 2175 - RNA, 22 nt, Artificial Sequence
  Description of Artificial Sequence: Synthetic oligonucleotide
accccugggagggacuugguuc

SEQ ID NO: 2176 - RNA, 22 nt, Artificial Sequence
  Description of Artificial Sequence: Synthetic oligonucleotide
gcuuagguggugcuuguugaag

SEQ ID NO: 2177 - RNA, 23 nt, Artificial Sequence
  Description of Artificial Sequence: Synthetic oligonucleotide
cugcaucaggauaagagacgacg

SEQ ID NO: 2178 - RNA, 21 nt, Artificial Sequence
  Description of Artificial Sequence: Synthetic oligonucleotide
ugacuagaucucuuguguucu

SEQ ID NO: 2179 - RNA, 22 nt, Artificial Sequence
  Description of Artificial Sequence: Synthetic oligonucleotide
ggucacagaggucaucaucugu

SEQ ID NO: 2180 - RNA, 17 nt, Artificial Sequence
  Description of Artificial Sequence: Synthetic oligonucleotide
cugucggagagggggug

SEQ ID NO: 2181 - RNA, 22 nt, Artificial Sequence
  Description of Artificial Sequence: Synthetic oligonucleotide
cuuggauagaggggagaccugg

SEQ ID NO: 2182 - RNA, 22 nt, Artificial Sequence
  Description of Artificial Sequence: Synthetic oligonucleotide
uguuuuagguguuaaugaaaac

SEQ ID NO: 2183 - RNA, 22 nt, Artificial Sequence
  Description of Artificial Sequence: Synthetic oligonucleotide
uaucuacuauacgugucaugau

SEQ ID NO: 2184 - RNA, 23 nt, Artificial Sequence
  Description of Artificial Sequence: Synthetic oligonucleotide
ugccgaucaccugguccacuuca

SEQ ID NO: 2185 - RNA, 21 nt, Artificial Sequence
  Description of Artificial Sequence: Synthetic oligonucleotide
acguccgacuagaagaagaga

SEQ ID NO: 2186 - RNA, 22 nt, Artificial Sequence
  Description of Artificial Sequence: Synthetic oligonucleotide
ucguuuuaggcguucaugaaaa

SEQ ID NO: 2187 - RNA, 23 nt, Artificial Sequence
  Description of Artificial Sequence: Synthetic oligonucleotide
gauggacgugacauucgugaaac

SEQ ID NO: 2188 - RNA, 22 nt, Artificial Sequence
  Description of Artificial Sequence: Synthetic oligonucleotide
ccucucggagguggguugggag

SEQ ID NO: 2189 - RNA, 19 nt, Artificial Sequence
  Description of Artificial Sequence: Synthetic oligonucleotide
uuuucauuaaugucaaaaa

SEQ ID NO: 2190 - RNA, 22 nt, Artificial Sequence
  Description of Artificial Sequence: Synthetic oligonucleotide
uguuuucaacggaaacacacua

SEQ ID NO: 2191 - RNA, 23 nt, Artificial Sequence
  Description of Artificial Sequence: Synthetic oligonucleotide
gaggucggggaggucccgaagga

SEQ ID NO: 2192 - RNA, 22 nt, Artificial Sequence
  Description of Artificial Sequence: Synthetic oligonucleotide
ccucucggagguggguugggag

SEQ ID NO: 2193 - RNA, 22 nt, Artificial Sequence
  Description of Artificial Sequence: Synthetic oligonucleotide
agucaaaggagacguuugucaa

SEQ ID NO: 2194 - RNA, 22 nt, Artificial Sequence
  Description of Artificial Sequence: Synthetic oligonucleotide
ucuuucgcgaaaggaaacaucu

SEQ ID NO: 2195 - RNA, 23 nt, Artificial Sequence
  Description of Artificial Sequence: Synthetic oligonucleotide
ugucuuucacgaagggaguucuc

SEQ ID NO: 2196 - RNA, 22 nt, Artificial Sequence
  Description of Artificial Sequence: Synthetic oligonucleotide
uccuuuggucguucacaacugc

SEQ ID NO: 2197 - RNA, 22 nt, Artificial Sequence
  Description of Artificial Sequence: Synthetic oligonucleotide
ucuccgucccaucacauuaccu

SEQ ID NO: 2198 - RNA, 23 nt, Artificial Sequence
  Description of Artificial Sequence: Synthetic oligonucleotide
aaauaacaccaucuaugauaauc

SEQ ID NO: 2199 - RNA, 20 nt, Artificial Sequence
  Description of Artificial Sequence: Synthetic oligonucleotide
cacacauauguaaauaugua

SEQ ID NO: 2200 - RNA, 22 nt, Artificial Sequence
  Description of Artificial Sequence: Synthetic oligonucleotide
uguaguagcguauaacuguguu

SEQ ID NO: 2201 - RNA, 22 nt, Artificial Sequence
  Description of Artificial Sequence: Synthetic oligonucleotide
cguguuuagaggucuggugggu

SEQ ID NO: 2202 - RNA, 27 nt, Artificial Sequence
  Description of Artificial Sequence: Synthetic oligonucleotide
aaaucgugucacgaauauguucuucca

SEQ ID NO: 2203 - RNA, 21 nt, Artificial Sequence
  Description of Artificial Sequence: Synthetic oligonucleotide
gguugguuacuuucuuacgaa

SEQ ID NO: 2204 - RNA, 20 nt, Artificial Sequence
  Description of Artificial Sequence: Synthetic oligonucleotide
aggggugucugggucucggc

SEQ ID NO: 2205 - RNA, 23 nt, Artificial Sequence
  Description of Artificial Sequence: Synthetic oligonucleotide
ugugucgagaagguauagagguc

SEQ ID NO: 2206 - RNA, 21 nt, Artificial Sequence
  Description of Artificial Sequence: Synthetic oligonucleotide
ugggucaucggucuacaucga

SEQ ID NO: 2207 - DNA, 22 bp, Artificial Sequence
  Description of Artificial Sequence: Synthetic oligonucleotide
ttaaagttctactattagacca

SEQ ID NO: 2208 - DNA, 22 bp, Artificial Sequence
  Description of Artificial Sequence: Synthetic oligonucleotide
aattcatccaactgaaatggca

SEQ ID NO: 2209 - DNA, 22 bp, Artificial Sequence
  Description of Artificial Sequence: Synthetic oligonucleotide
tttgaatatgtactgctctgct

SEQ ID NO: 2210 - DNA, 22 bp, Artificial Sequence
  Description of Artificial Sequence: Synthetic oligonucleotide
ttaaagttctagtttagcagca

SEQ ID NO: 2211 - DNA, 22 bp, Artificial Sequence
  Description of Artificial Sequence: Synthetic oligonucleotide
attgtagaagtaaatgccagcc

SEQ ID NO: 2212 - DNA, 22 bp, Artificial Sequence
  Description of Artificial Sequence: Synthetic oligonucleotide
tttggattaggcagcttatcca

SEQ ID NO: 2213 - DNA, 22 bp, Artificial Sequence
  Description of Artificial Sequence: Synthetic oligonucleotide
taagcctctgattaatgctgcc

SEQ ID NO: 2214 - DNA, 22 bp, Artificial Sequence
  Description of Artificial Sequence: Synthetic oligonucleotide
ttagattcttcaatttgctcct

SEQ ID NO: 2215 - DNA, 22 bp, Artificial Sequence
  Description of Artificial Sequence: Synthetic oligonucleotide
attctcatggaggacaccaggt

SEQ ID NO: 2216 - DNA, 22 bp, Artificial Sequence
  Description of Artificial Sequence: Synthetic oligonucleotide
ttaatccatcgatcaatgccgt

SEQ ID NO: 2217 - DNA, 22 bp, Artificial Sequence
  Description of Artificial Sequence: Synthetic oligonucleotide
tagaaattcgaagtccgacggg

SEQ ID NO: 2218 - DNA, 22 bp, Artificial Sequence
  Description of Artificial Sequence: Synthetic oligonucleotide
atgatgaatgaagtaggcagct

SEQ ID NO: 2219 - DNA, 22 bp, Artificial Sequence
  Description of Artificial Sequence: Synthetic oligonucleotide
atgtctggaaagataaactgct

SEQ ID NO: 2220 - DNA, 22 bp, Artificial Sequence
  Description of Artificial Sequence: Synthetic oligonucleotide
ttcttgaagagcttcaggtggt

SEQ ID NO: 2221 - DNA, 22 bp, Artificial Sequence
  Description of Artificial Sequence: Synthetic oligonucleotide
atgtctcggcacatgctctgca

SEQ ID NO: 2222 - DNA, 22 bp, Artificial Sequence
  Description of Artificial Sequence: Synthetic oligonucleotide
aatgaaattcatggtctctgca

SEQ ID NO: 2223 - DNA, 22 bp, Artificial Sequence
  Description of Artificial Sequence: Synthetic oligonucleotide
tttccttaacctgttggcagca

SEQ ID NO: 2224 - DNA, 22 bp, Artificial Sequence
  Description of Artificial Sequence: Synthetic oligonucleotide
tttcattatttgtacttctcgg

SEQ ID NO: 2225 - DNA, 22 bp, Artificial Sequence
  Description of Artificial Sequence: Synthetic oligonucleotide
ataaagtttgattatgtgaggg

SEQ ID NO: 2226 - DNA, 22 bp, Artificial Sequence
  Description of Artificial Sequence: Synthetic oligonucleotide
taaagctgacaggtgttctggg

SEQ ID NO: 2227 - DNA, 22 bp, Artificial Sequence
  Description of Artificial Sequence: Synthetic oligonucleotide
atatggtgagaagccatctggt

SEQ ID NO: 2228 - DNA, 22 bp, Artificial Sequence
  Description of Artificial Sequence: Synthetic oligonucleotide
tttcttctacactcttctgccc

SEQ ID NO: 2229 - DNA, 22 bp, Artificial Sequence
  Description of Artificial Sequence: Synthetic oligonucleotide
aataatgatgatatcttctcca

SEQ ID NO: 2230 - DNA, 22 bp, Artificial Sequence
  Description of Artificial Sequence: Synthetic oligonucleotide
tttcatggagatacgaaaggcc

SEQ ID NO: 2231 - DNA, 22 bp, Artificial Sequence
  Description of Artificial Sequence: Synthetic oligonucleotide
atatcaaagcaagatgattgga

SEQ ID NO: 2232 - DNA, 22 bp, Artificial Sequence
  Description of Artificial Sequence: Synthetic oligonucleotide
taatcagcagaaacggcagcgt

SEQ ID NO: 2233 - DNA, 22 bp, Artificial Sequence
  Description of Artificial Sequence: Synthetic oligonucleotide
tttgttgcagcctcgacagggc

SEQ ID NO: 2234 - DNA, 22 bp, Artificial Sequence
  Description of Artificial Sequence: Synthetic oligonucleotide
atggctttgaagagacggcggc

SEQ ID NO: 2235 - DNA, 22 bp, Artificial Sequence
  Description of Artificial Sequence: Synthetic oligonucleotide
aagaatgttgacgtgttgcccg

SEQ ID NO: 2236 - DNA, 22 bp, Artificial Sequence
  Description of Artificial Sequence: Synthetic oligonucleotide
aatgatgttcaggtgattcggg

SEQ ID NO: 2237 - DNA, 22 bp, Artificial Sequence
  Description of Artificial Sequence: Synthetic oligonucleotide
atgcagtaggatgttctgcggc

SEQ ID NO: 2238 - DNA, 22 bp, Artificial Sequence
  Description of Artificial Sequence: Synthetic oligonucleotide
ttcatattcctcatagattccc

SEQ ID NO: 2239 - DNA, 22 bp, Artificial Sequence
  Description of Artificial Sequence: Synthetic oligonucleotide
tttctatggaacaaagcagccg

SEQ ID NO: 2240 - DNA, 22 bp, Artificial Sequence
  Description of Artificial Sequence: Synthetic oligonucleotide
atcaagataaaggctggcagct

SEQ ID NO: 2241 - DNA, 22 bp, Artificial Sequence
  Description of Artificial Sequence: Synthetic oligonucleotide
taaagggaagaattagagccgt

SEQ ID NO: 2242 - DNA, 22 bp, Artificial Sequence
  Description of Artificial Sequence: Synthetic oligonucleotide
ataaagggaagaattagagccg

SEQ ID NO: 2243 - DNA, 22 bp, Artificial Sequence
  Description of Artificial Sequence: Synthetic oligonucleotide
taacccaagaattatattcgga

SEQ ID NO: 2244 - DNA, 22 bp, Artificial Sequence
  Description of Artificial Sequence: Synthetic oligonucleotide
aatatagacaatatttccacgt

SEQ ID NO: 2245 - DNA, 22 bp, Artificial Sequence
  Description of Artificial Sequence: Synthetic oligonucleotide
aatgtggaacagttacaaacgt

SEQ ID NO: 2246 - DNA, 22 bp, Artificial Sequence
  Description of Artificial Sequence: Synthetic oligonucleotide
taacttgtccatcaatagggca

SEQ ID NO: 2247 - DNA, 22 bp, Artificial Sequence
  Description of Artificial Sequence: Synthetic oligonucleotide
ataacttgtccatcaatagggc

SEQ ID NO: 2248 - DNA, 22 bp, Artificial Sequence
  Description of Artificial Sequence: Synthetic oligonucleotide
attcttatgaacaataggagga

SEQ ID NO: 2249 - DNA, 22 bp, Artificial Sequence
  Description of Artificial Sequence: Synthetic oligonucleotide
tatctaaagtgcttcaggaggt

SEQ ID NO: 2250 - DNA, 22 bp, Artificial Sequence
  Description of Artificial Sequence: Synthetic oligonucleotide
attactgtagaactttccaggt

SEQ ID NO: 2251 - DNA, 22 bp, Artificial Sequence
  Description of Artificial Sequence: Synthetic oligonucleotide
ttagcattggagctcactcggc

SEQ ID NO: 2252 - DNA, 22 bp, Artificial Sequence
  Description of Artificial Sequence: Synthetic oligonucleotide
aatttgaaccacagtccttgca

SEQ ID NO: 2253 - DNA, 22 bp, Artificial Sequence
  Description of Artificial Sequence: Synthetic oligonucleotide
tttcaaatgcaaactctttgca

SEQ ID NO: 2254 - DNA, 22 bp, Artificial Sequence
  Description of Artificial Sequence: Synthetic oligonucleotide
ttctcgaagggcgtcagctggc

SEQ ID NO: 2255 - DNA, 22 bp, Artificial Sequence
  Description of Artificial Sequence: Synthetic oligonucleotide
ttcatgcatgtgcttcacggca

SEQ ID NO: 2256 - DNA, 22 bp, Artificial Sequence
  Description of Artificial Sequence: Synthetic oligonucleotide
ttcatgatgcagtcgattccgt

SEQ ID NO: 2257 - DNA, 22 bp, Artificial Sequence
  Description of Artificial Sequence: Synthetic oligonucleotide
ttgatggattggagggagccgg

SEQ ID NO: 2258 - DNA, 22 bp, Artificial Sequence
  Description of Artificial Sequence: Synthetic oligonucleotide
ttctttcttaataattctccca

SEQ ID NO: 2259 - DNA, 22 bp, Artificial Sequence
  Description of Artificial Sequence: Synthetic oligonucleotide
ttatcttggcaataagactcca

SEQ ID NO: 2260 - DNA, 22 bp, Artificial Sequence
  Description of Artificial Sequence: Synthetic oligonucleotide
taaggagatattcttacttggt

SEQ ID NO: 2261 - DNA, 22 bp, Artificial Sequence
  Description of Artificial Sequence: Synthetic oligonucleotide
tatttctggaaggcccataggt

SEQ ID NO: 2262 - DNA, 22 bp, Artificial Sequence
  Description of Artificial Sequence: Synthetic oligonucleotide
ttatggtagtaataaatctggt

SEQ ID NO: 2263 - DNA, 22 bp, Artificial Sequence
  Description of Artificial Sequence: Synthetic oligonucleotide
aatacctttgccaacaatgggc

SEQ ID NO: 2264 - DNA, 22 bp, Artificial Sequence
  Description of Artificial Sequence: Synthetic oligonucleotide
ataaatgttgccagtcaatgcc

SEQ ID NO: 2265 - DNA, 22 bp, Artificial Sequence
  Description of Artificial Sequence: Synthetic oligonucleotide
attgtcaatgccctcaataggt

SEQ ID NO: 2266 - DNA, 22 bp, Artificial Sequence
  Description of Artificial Sequence: Synthetic oligonucleotide
attctccaggaccctgtctggg

SEQ ID NO: 2267 - DNA, 22 bp, Artificial Sequence
  Description of Artificial Sequence: Synthetic oligonucleotide
ttctccctggtcagcaggtcca

SEQ ID NO: 2268 - DNA, 22 bp, Artificial Sequence
  Description of Artificial Sequence: Synthetic oligonucleotide
tacaatctggaagttagaaggg

SEQ ID NO: 2269 - DNA, 22 bp, Artificial Sequence
  Description of Artificial Sequence: Synthetic oligonucleotide
ttcttaggtggcttcccgaggg

SEQ ID NO: 2270 - DNA, 22 bp, Artificial Sequence
  Description of Artificial Sequence: Synthetic oligonucleotide
tatttgcaggagaagtagtccg

SEQ ID NO: 2271 - DNA, 22 bp, Artificial Sequence
  Description of Artificial Sequence: Synthetic oligonucleotide
tttgttaaagtgcttcagtcgc

SEQ ID NO: 2272 - DNA, 22 bp, Artificial Sequence
  Description of Artificial Sequence: Synthetic oligonucleotide
attattgatgatactgtaaggc

SEQ ID NO: 2273 - DNA, 22 bp, Artificial Sequence
  Description of Artificial Sequence: Synthetic oligonucleotide
tattaaatctatctgtactcca

SEQ ID NO: 2274 - DNA, 22 bp, Artificial Sequence
  Description of Artificial Sequence: Synthetic oligonucleotide
tttgcattggcagagacttgct

SEQ ID NO: 2275 - DNA, 22 bp, Artificial Sequence
  Description of Artificial Sequence: Synthetic oligonucleotide
atatctgacaaacaagagtggt

SEQ ID NO: 2276 - DNA, 22 bp, Artificial Sequence
  Description of Artificial Sequence: Synthetic oligonucleotide
tttctccatcaagctgttccgg

SEQ ID NO: 2277 - DNA, 22 bp, Artificial Sequence
  Description of Artificial Sequence: Synthetic oligonucleotide
tatgtagcagaagtaatggcca

SEQ ID NO: 2278 - DNA, 22 bp, Artificial Sequence
  Description of Artificial Sequence: Synthetic oligonucleotide
ttatgtagcagaagtaatggcc

SEQ ID NO: 2279 - DNA, 22 bp, Artificial Sequence
  Description of Artificial Sequence: Synthetic oligonucleotide
tttatgtagcagaagtaatggc

SEQ ID NO: 2280 - DNA, 22 bp, Artificial Sequence
  Description of Artificial Sequence: Synthetic oligonucleotide
attctaaagcatagttaatgct

SEQ ID NO: 2281 - DNA, 22 bp, Artificial Sequence
  Description of Artificial Sequence: Synthetic oligonucleotide
tatatagcagtgcagatctcct

SEQ ID NO: 2282 - DNA, 22 bp, Artificial Sequence
  Description of Artificial Sequence: Synthetic oligonucleotide
tttagctttggactacacagcg

SEQ ID NO: 2283 - DNA, 22 bp, Artificial Sequence
  Description of Artificial Sequence: Synthetic oligonucleotide
atttacttggctttcacaagca

SEQ ID NO: 2284 - DNA, 22 bp, Artificial Sequence
  Description of Artificial Sequence: Synthetic oligonucleotide
ttataaacgataaagtcctcct

SEQ ID NO: 2285 - DNA, 22 bp, Artificial Sequence
  Description of Artificial Sequence: Synthetic oligonucleotide
tatcctctttatttgaaccgcc

SEQ ID NO: 2286 - DNA, 22 bp, Artificial Sequence
  Description of Artificial Sequence: Synthetic oligonucleotide
atagcctttaatatctcctggt

SEQ ID NO: 2287 - DNA, 22 bp, Artificial Sequence
  Description of Artificial Sequence: Synthetic oligonucleotide
attgggaaagacaaggagcggg

SEQ ID NO: 2288 - DNA, 22 bp, Artificial Sequence
  Description of Artificial Sequence: Synthetic oligonucleotide
aactgtgaggaaagcatgtggc

SEQ ID NO: 2289 - DNA, 22 bp, Artificial Sequence
  Description of Artificial Sequence: Synthetic oligonucleotide
atgtgttgattatttaggacga

SEQ ID NO: 2290 - DNA, 22 bp, Artificial Sequence
  Description of Artificial Sequence: Synthetic oligonucleotide
atgaggtcccataattgtggct

SEQ ID NO: 2291 - DNA, 22 bp, Artificial Sequence
  Description of Artificial Sequence: Synthetic oligonucleotide
tatggtctgtcatgaggtccca

SEQ ID NO: 2292 - DNA, 22 bp, Artificial Sequence
  Description of Artificial Sequence: Synthetic oligonucleotide
tttagaaagtgttaaagcaggc

SEQ ID NO: 2293 - DNA, 22 bp, Artificial Sequence
  Description of Artificial Sequence: Synthetic oligonucleotide
tttcttctggacaggagcaggg

SEQ ID NO: 2294 - DNA, 22 bp, Artificial Sequence
  Description of Artificial Sequence: Synthetic oligonucleotide
tttcatcaactgtggaatgcgc

SEQ ID NO: 2295 - DNA, 22 bp, Artificial Sequence
  Description of Artificial Sequence: Synthetic oligonucleotide
ttagttctctctgttgacagcc

SEQ ID NO: 2296 - DNA, 22 bp, Artificial Sequence
  Description of Artificial Sequence: Synthetic oligonucleotide
aatactgtgctcttaatgggcc

SEQ ID NO: 2297 - DNA, 22 bp, Artificial Sequence
  Description of Artificial Sequence: Synthetic oligonucleotide
atctcgatgagccggctgcgcc

SEQ ID NO: 2298 - DNA, 22 bp, Artificial Sequence
  Description of Artificial Sequence: Synthetic oligonucleotide
aagcaggaggagaaggtggcga

SEQ ID NO: 2299 - DNA, 22 bp, Artificial Sequence
  Description of Artificial Sequence: Synthetic oligonucleotide
ttcatgatgtaggcgatggcga

SEQ ID NO: 2300 - DNA, 22 bp, Artificial Sequence
  Description of Artificial Sequence: Synthetic oligonucleotide
ttgtcattgctcctgaggagct

SEQ ID NO: 2301 - DNA, 22 bp, Artificial Sequence
  Description of Artificial Sequence: Synthetic oligonucleotide
tttctttgtcattgctcctgag

SEQ ID NO: 2302 - DNA, 22 bp, Artificial Sequence
  Description of Artificial Sequence: Synthetic oligonucleotide
gttgaagaagatggactcacgg

SEQ ID NO: 2303 - DNA, 22 bp, Artificial Sequence
  Description of Artificial Sequence: Synthetic oligonucleotide
attctggaccacgcagggtggc

SEQ ID NO: 2304 - DNA, 22 bp, Artificial Sequence
  Description of Artificial Sequence: Synthetic oligonucleotide
aacttgaagtagctgaggtggt

SEQ ID NO: 2305 - DNA, 22 bp, Artificial Sequence
  Description of Artificial Sequence: Synthetic oligonucleotide
atagccaacagtagcatgtggc

SEQ ID NO: 2306 - DNA, 22 bp, Artificial Sequence
  Description of Artificial Sequence: Synthetic oligonucleotide
aatttccagcacgtcagtgggc

SEQ ID NO: 2307 - DNA, 22 bp, Artificial Sequence
  Description of Artificial Sequence: Synthetic oligonucleotide
tttctgtagaaattgcggagct

SEQ ID NO: 2308 - DNA, 22 bp, Artificial Sequence
  Description of Artificial Sequence: Synthetic oligonucleotide
tttggatggaataatttgtgct

SEQ ID NO: 2309 - DNA, 22 bp, Artificial Sequence
  Description of Artificial Sequence: Synthetic oligonucleotide
ttatccatatagctgctcacca

SEQ ID NO: 2310 - DNA, 22 bp, Artificial Sequence
  Description of Artificial Sequence: Synthetic oligonucleotide
ttggctcaggaatcattatggc

SEQ ID NO: 2311 - DNA, 22 bp, Artificial Sequence
  Description of Artificial Sequence: Synthetic oligonucleotide
atacaaactgatcatagcagga

SEQ ID NO: 2312 - DNA, 22 bp, Artificial Sequence
  Description of Artificial Sequence: Synthetic oligonucleotide
ttatccttctaattccactgga

SEQ ID NO: 2313 - DNA, 22 bp, Artificial Sequence
  Description of Artificial Sequence: Synthetic oligonucleotide
ttacttatacagtaggtcagga

SEQ ID NO: 2314 - DNA, 22 bp, Artificial Sequence
  Description of Artificial Sequence: Synthetic oligonucleotide
ttctgatctgacagaggcagga

SEQ ID NO: 2315 - DNA, 22 bp, Artificial Sequence
  Description of Artificial Sequence: Synthetic oligonucleotide
tttaatcttaggatttacagca

SEQ ID NO: 2316 - DNA, 22 bp, Artificial Sequence
  Description of Artificial Sequence: Synthetic oligonucleotide
ttatgtatacaccgcactgcgt

SEQ ID NO: 2317 - DNA, 22 bp, Artificial Sequence
  Description of Artificial Sequence: Synthetic oligonucleotide
attatgtatacaccgcactgcg

SEQ ID NO: 2318 - DNA, 22 bp, Artificial Sequence
  Description of Artificial Sequence: Synthetic oligonucleotide
ttgtggtaaatgttgttgccgg

SEQ ID NO: 2319 - DNA, 22 bp, Artificial Sequence
  Description of Artificial Sequence: Synthetic oligonucleotide
ttctgcaaccatatctgcaggc

SEQ ID NO: 2320 - DNA, 22 bp, Artificial Sequence
  Description of Artificial Sequence: Synthetic oligonucleotide
ttcttctgcaaccatatctgca

SEQ ID NO: 2321 - DNA, 22 bp, Artificial Sequence
  Description of Artificial Sequence: Synthetic oligonucleotide
tttagaaccacttcatctggca

SEQ ID NO: 2322 - DNA, 22 bp, Artificial Sequence
  Description of Artificial Sequence: Synthetic oligonucleotide
attgattgccaattcgtaaggc

SEQ ID NO: 2323 - DNA, 22 bp, Artificial Sequence
  Description of Artificial Sequence: Synthetic oligonucleotide
ataatcttggccataagaagct

SEQ ID NO: 2324 - DNA, 22 bp, Artificial Sequence
  Description of Artificial Sequence: Synthetic oligonucleotide
atatacttggccataggttcct

SEQ ID NO: 2325 - DNA, 22 bp, Artificial Sequence
  Description of Artificial Sequence: Synthetic oligonucleotide
tatattctgcatgtcagctggt

SEQ ID NO: 2326 - DNA, 22 bp, Artificial Sequence
  Description of Artificial Sequence: Synthetic oligonucleotide
tattcttccttcagccactgcc

SEQ ID NO: 2327 - DNA, 22 bp, Artificial Sequence
  Description of Artificial Sequence: Synthetic oligonucleotide
tatagtcaatattgtagaggct

SEQ ID NO: 2328 - DNA, 22 bp, Artificial Sequence
  Description of Artificial Sequence: Synthetic oligonucleotide
ttactttaaataactgaagccc

SEQ ID NO: 2329 - DNA, 22 bp, Artificial Sequence
  Description of Artificial Sequence: Synthetic oligonucleotide
tttatacaggtgttaagctccc

SEQ ID NO: 2330 - DNA, 22 bp, Artificial Sequence
  Description of Artificial Sequence: Synthetic oligonucleotide
aatatatacatggtaatggcct

SEQ ID NO: 2331 - DNA, 22 bp, Artificial Sequence
  Description of Artificial Sequence: Synthetic oligonucleotide
taatatatacatggtaatggcc

SEQ ID NO: 2332 - DNA, 22 bp, Artificial Sequence
  Description of Artificial Sequence: Synthetic oligonucleotide
attgagcttccatttctgagcc

SEQ ID NO: 2333 - DNA, 22 bp, Artificial Sequence
  Description of Artificial Sequence: Synthetic oligonucleotide
atattccctgagtggctgccgg

SEQ ID NO: 2334 - DNA, 22 bp, Artificial Sequence
  Description of Artificial Sequence: Synthetic oligonucleotide
tttagcttctgaattaagtgca

SEQ ID NO: 2335 - DNA, 22 bp, Artificial Sequence
  Description of Artificial Sequence: Synthetic oligonucleotide
ttgcttgtgatcatagccacgt

SEQ ID NO: 2336 - DNA, 22 bp, Artificial Sequence
  Description of Artificial Sequence: Synthetic oligonucleotide
aactgagagaacatcagctgcc

SEQ ID NO: 2337 - DNA, 22 bp, Artificial Sequence
  Description of Artificial Sequence: Synthetic oligonucleotide
ttccaattgatcattcctccct

SEQ ID NO: 2338 - DNA, 22 bp, Artificial Sequence
  Description of Artificial Sequence: Synthetic oligonucleotide
ttacagtaagagggttacagca

SEQ ID NO: 2339 - DNA, 22 bp, Artificial Sequence
  Description of Artificial Sequence: Synthetic oligonucleotide
tttgcagaacataacagttgca

SEQ ID NO: 2340 - DNA, 22 bp, Artificial Sequence
  Description of Artificial Sequence: Synthetic oligonucleotide
attatcgtccacagttccacgt

SEQ ID NO: 2341 - DNA, 22 bp, Artificial Sequence
  Description of Artificial Sequence: Synthetic oligonucleotide
tttactgagcagacgaactggc

SEQ ID NO: 2342 - DNA, 22 bp, Artificial Sequence
  Description of Artificial Sequence: Synthetic oligonucleotide
atatctgtggagaaagtgtcgg

SEQ ID NO: 2343 - DNA, 22 bp, Artificial Sequence
  Description of Artificial Sequence: Synthetic oligonucleotide
ttaagacacataactctttccc

SEQ ID NO: 2344 - DNA, 22 bp, Artificial Sequence
  Description of Artificial Sequence: Synthetic oligonucleotide
ataatagaggtgtcagaaagct

SEQ ID NO: 2345 - DNA, 22 bp, Artificial Sequence
  Description of Artificial Sequence: Synthetic oligonucleotide
atccagttcagtgatatgacgt

SEQ ID NO: 2346 - DNA, 22 bp, Artificial Sequence
  Description of Artificial Sequence: Synthetic oligonucleotide
aagtcttgccagagtatcccgg

SEQ ID NO: 2347 - DNA, 22 bp, Artificial Sequence
  Description of Artificial Sequence: Synthetic oligonucleotide
attccagtatcacaacacaggt

SEQ ID NO: 2348 - DNA, 22 bp, Artificial Sequence
  Description of Artificial Sequence: Synthetic oligonucleotide
tttctacatcatgagcagtcca

SEQ ID NO: 2349 - DNA, 22 bp, Artificial Sequence
  Description of Artificial Sequence: Synthetic oligonucleotide
attatagaggcattcaattcga

SEQ ID NO: 2350 - DNA, 22 bp, Artificial Sequence
  Description of Artificial Sequence: Synthetic oligonucleotide
tttatgcatgggattcaaggca

SEQ ID NO: 2351 - DNA, 22 bp, Artificial Sequence
  Description of Artificial Sequence: Synthetic oligonucleotide
taaaggatgccagtaatagcct

SEQ ID NO: 2352 - DNA, 22 bp, Artificial Sequence
  Description of Artificial Sequence: Synthetic oligonucleotide
attctctgaagattattgtgct

SEQ ID NO: 2353 - DNA, 22 bp, Artificial Sequence
  Description of Artificial Sequence: Synthetic oligonucleotide
taatcaaagtaatggaagaggg

SEQ ID NO: 2354 - DNA, 22 bp, Artificial Sequence
  Description of Artificial Sequence: Synthetic oligonucleotide
attaatctccagatggcaagga

SEQ ID NO: 2355 - DNA, 22 bp, Artificial Sequence
  Description of Artificial Sequence: Synthetic oligonucleotide
ataaattctcatctgagtggct

SEQ ID NO: 2356 - DNA, 22 bp, Artificial Sequence
  Description of Artificial Sequence: Synthetic oligonucleotide
tttaaatgagatgcttgctgga

SEQ ID NO: 2357 - DNA, 22 bp, Artificial Sequence
  Description of Artificial Sequence: Synthetic oligonucleotide
aattattagtagggtcacacct

SEQ ID NO: 2358 - DNA, 22 bp, Artificial Sequence
  Description of Artificial Sequence: Synthetic oligonucleotide
tagggcaagatctccacagggc

SEQ ID NO: 2359 - DNA, 22 bp, Artificial Sequence
  Description of Artificial Sequence: Synthetic oligonucleotide
tatttgtagcagttaggaagcc

SEQ ID NO: 2360 - DNA, 22 bp, Artificial Sequence
  Description of Artificial Sequence: Synthetic oligonucleotide
tttcaagaatgaagtggttggg

SEQ ID NO: 2361 - DNA, 22 bp, Artificial Sequence
  Description of Artificial Sequence: Synthetic oligonucleotide
tttcttcctctgagtcattggc

SEQ ID NO: 2362 - DNA, 22 bp, Artificial Sequence
  Description of Artificial Sequence: Synthetic oligonucleotide
tttgagattcttagaatcacgg

SEQ ID NO: 2363 - DNA, 22 bp, Artificial Sequence
  Description of Artificial Sequence: Synthetic oligonucleotide
ttatatgattacaggtctccca

SEQ ID NO: 2364 - DNA, 22 bp, Artificial Sequence
  Description of Artificial Sequence: Synthetic oligonucleotide
attgaaacaagaatgcccaggt

SEQ ID NO: 2365 - DNA, 22 bp, Artificial Sequence
  Description of Artificial Sequence: Synthetic oligonucleotide
ttcttagaaccaaatgtggccg

SEQ ID NO: 2366 - DNA, 22 bp, Artificial Sequence
  Description of Artificial Sequence: Synthetic oligonucleotide
ttaattgacctcagaagatgca

SEQ ID NO: 2367 - DNA, 22 bp, Artificial Sequence
  Description of Artificial Sequence: Synthetic oligonucleotide
atttgcttgaagtttcactggc

SEQ ID NO: 2368 - DNA, 22 bp, Artificial Sequence
  Description of Artificial Sequence: Synthetic oligonucleotide
attcctgaaattaaagttcgga

SEQ ID NO: 2369 - DNA, 22 bp, Artificial Sequence
  Description of Artificial Sequence: Synthetic oligonucleotide
tagttctaactcattattccgt

SEQ ID NO: 2370 - DNA, 22 bp, Artificial Sequence
  Description of Artificial Sequence: Synthetic oligonucleotide
aattactaatattgactgtgga

SEQ ID NO: 2371 - DNA, 22 bp, Artificial Sequence
  Description of Artificial Sequence: Synthetic oligonucleotide
tttaagaatgctctcaattgct

SEQ ID NO: 2372 - DNA, 22 bp, Artificial Sequence
  Description of Artificial Sequence: Synthetic oligonucleotide
tatggattggatgtcgcgtggg

SEQ ID NO: 2373 - DNA, 22 bp, Artificial Sequence
  Description of Artificial Sequence: Synthetic oligonucleotide
ttaacaattcatctgatgccgc

SEQ ID NO: 2374 - DNA, 22 bp, Artificial Sequence
  Description of Artificial Sequence: Synthetic oligonucleotide
aatcggatcagctgcttgtgcc

SEQ ID NO: 2375 - DNA, 22 bp, Artificial Sequence
  Description of Artificial Sequence: Synthetic oligonucleotide
atcagtgggtatcttgtttgca

SEQ ID NO: 2376 - DNA, 22 bp, Artificial Sequence
  Description of Artificial Sequence: Synthetic oligonucleotide
atttcatcttcatatcttgcct

SEQ ID NO: 2377 - DNA, 22 bp, Artificial Sequence
  Description of Artificial Sequence: Synthetic oligonucleotide
taaatatcaagaacctacaggg

SEQ ID NO: 2378 - DNA, 22 bp, Artificial Sequence
  Description of Artificial Sequence: Synthetic oligonucleotide
ttgttgcttaaagttctaagct

SEQ ID NO: 2379 - DNA, 22 bp, Artificial Sequence
  Description of Artificial Sequence: Synthetic oligonucleotide
taaatagagggagctggctcca

SEQ ID NO: 2380 - DNA, 22 bp, Artificial Sequence
  Description of Artificial Sequence: Synthetic oligonucleotide
attccttctttgaaagctccgg

SEQ ID NO: 2381 - DNA, 22 bp, Artificial Sequence
  Description of Artificial Sequence: Synthetic oligonucleotide
atttcttctcctgatgtctcct

SEQ ID NO: 2382 - DNA, 22 bp, Artificial Sequence
  Description of Artificial Sequence: Synthetic oligonucleotide
ttcttgttgcagtttggcaggt

SEQ ID NO: 2383 - DNA, 22 bp, Artificial Sequence
  Description of Artificial Sequence: Synthetic oligonucleotide
tacagtgaataaataaacagct

SEQ ID NO: 2384 - DNA, 22 bp, Artificial Sequence
  Description of Artificial Sequence: Synthetic oligonucleotide
ttctcgataaagcctgtgcgca

SEQ ID NO: 2385 - DNA, 22 bp, Artificial Sequence
  Description of Artificial Sequence: Synthetic oligonucleotide
tattgcatctagattctttgcc

SEQ ID NO: 2386 - DNA, 22 bp, Artificial Sequence
  Description of Artificial Sequence: Synthetic oligonucleotide
atgagatgagttgtcatgtcct

SEQ ID NO: 2387 - DNA, 22 bp, Artificial Sequence
  Description of Artificial Sequence: Synthetic oligonucleotide
attaacaacaacaatctgaggt

SEQ ID NO: 2388 - DNA, 22 bp, Artificial Sequence
  Description of Artificial Sequence: Synthetic oligonucleotide
atgaacatgctgagggtgtccc

SEQ ID NO: 2389 - DNA, 22 bp, Artificial Sequence
  Description of Artificial Sequence: Synthetic oligonucleotide
aaggaggatgaaattgtatggt

SEQ ID NO: 2390 - DNA, 22 bp, Artificial Sequence
  Description of Artificial Sequence: Synthetic oligonucleotide
aaccacttgccagtgatccggt

SEQ ID NO: 2391 - DNA, 22 bp, Artificial Sequence
  Description of Artificial Sequence: Synthetic oligonucleotide
tatagaagcactggttctggcg

SEQ ID NO: 2392 - DNA, 22 bp, Artificial Sequence
  Description of Artificial Sequence: Synthetic oligonucleotide
ttatagaagcactggttctggc

SEQ ID NO: 2393 - DNA, 22 bp, Artificial Sequence
  Description of Artificial Sequence: Synthetic oligonucleotide
ttatattcaaatcgatctgcgc

SEQ ID NO: 2394 - DNA, 22 bp, Artificial Sequence
  Description of Artificial Sequence: Synthetic oligonucleotide
aatatgtgtcatactgggaggt

SEQ ID NO: 2395 - DNA, 22 bp, Artificial Sequence
  Description of Artificial Sequence: Synthetic oligonucleotide
taatggtgtaggtgttacaccc

SEQ ID NO: 2396 - DNA, 22 bp, Artificial Sequence
  Description of Artificial Sequence: Synthetic oligonucleotide
tatcctgtataattgatatgct

SEQ ID NO: 2397 - DNA, 22 bp, Artificial Sequence
  Description of Artificial Sequence: Synthetic oligonucleotide
tttataatccagttggagagga

SEQ ID NO: 2398 - DNA, 22 bp, Artificial Sequence
  Description of Artificial Sequence: Synthetic oligonucleotide
tatagtaatcaactgacttcca

SEQ ID NO: 2399 - DNA, 22 bp, Artificial Sequence
  Description of Artificial Sequence: Synthetic oligonucleotide
ttctggtttcaaagtagcaggg

SEQ ID NO: 2400 - DNA, 22 bp, Artificial Sequence
  Description of Artificial Sequence: Synthetic oligonucleotide
atgaatatacacaatcagggct

SEQ ID NO: 2401 - DNA, 22 bp, Artificial Sequence
  Description of Artificial Sequence: Synthetic oligonucleotide
attccatcaatgtttcaaggct

SEQ ID NO: 2402 - DNA, 22 bp, Artificial Sequence
  Description of Artificial Sequence: Synthetic oligonucleotide
taaacaattctgttgacgtgga

SEQ ID NO: 2403 - DNA, 22 bp, Artificial Sequence
  Description of Artificial Sequence: Synthetic oligonucleotide
ttgtcacacaaggttcttcgca

SEQ ID NO: 2404 - DNA, 22 bp, Artificial Sequence
  Description of Artificial Sequence: Synthetic oligonucleotide
atatttcatgattgtccaaggt

SEQ ID NO: 2405 - DNA, 22 bp, Artificial Sequence
  Description of Artificial Sequence: Synthetic oligonucleotide
ttggaatatacaaagtacagcc

SEQ ID NO: 2406 - DNA, 22 bp, Artificial Sequence
  Description of Artificial Sequence: Synthetic oligonucleotide
tttagaagtgaagatgctgcca

SEQ ID NO: 2407 - DNA, 22 bp, Artificial Sequence
  Description of Artificial Sequence: Synthetic oligonucleotide
ataagatctggctttggaagga

SEQ ID NO: 2408 - DNA, 22 bp, Artificial Sequence
  Description of Artificial Sequence: Synthetic oligonucleotide
tataaataaggcacagatgccc

SEQ ID NO: 2409 - DNA, 22 bp, Artificial Sequence
  Description of Artificial Sequence: Synthetic oligonucleotide
taaataatatatgttcctgccc

SEQ ID NO: 2410 - DNA, 22 bp, Artificial Sequence
  Description of Artificial Sequence: Synthetic oligonucleotide
tatcttcatcagttccaaggcc

SEQ ID NO: 2411 - DNA, 22 bp, Artificial Sequence
  Description of Artificial Sequence: Synthetic oligonucleotide
ttcacatgctcccagggctgcg

SEQ ID NO: 2412 - DNA, 22 bp, Artificial Sequence
  Description of Artificial Sequence: Synthetic oligonucleotide
attcccattcttctgccatgcc

SEQ ID NO: 2413 - DNA, 22 bp, Artificial Sequence
  Description of Artificial Sequence: Synthetic oligonucleotide
ttcaattgatggagaagcgccg

SEQ ID NO: 2414 - DNA, 22 bp, Artificial Sequence
  Description of Artificial Sequence: Synthetic oligonucleotide
taactggtgcagttgcagggca

SEQ ID NO: 2415 - DNA, 22 bp, Artificial Sequence
  Description of Artificial Sequence: Synthetic oligonucleotide
ttctggatcagccttgcgagga

SEQ ID NO: 2416 - DNA, 22 bp, Artificial Sequence
  Description of Artificial Sequence: Synthetic oligonucleotide
taaatattcaagaggaatgcct

SEQ ID NO: 2417 - DNA, 22 bp, Artificial Sequence
  Description of Artificial Sequence: Synthetic oligonucleotide
ttcagtgtcctatgcaggagcc

SEQ ID NO: 2418 - DNA, 22 bp, Artificial Sequence
  Description of Artificial Sequence: Synthetic oligonucleotide
attaatggatgctttctagcct

SEQ ID NO: 2419 - DNA, 22 bp, Artificial Sequence
  Description of Artificial Sequence: Synthetic oligonucleotide
atcatctttgaataagaaacca

SEQ ID NO: 2420 - DNA, 22 bp, Artificial Sequence
  Description of Artificial Sequence: Synthetic oligonucleotide
atctacatagccattgagccgg

SEQ ID NO: 2421 - DNA, 22 bp, Artificial Sequence
  Description of Artificial Sequence: Synthetic oligonucleotide
ttgaagtagctcaacatggccg

SEQ ID NO: 2422 - DNA, 22 bp, Artificial Sequence
  Description of Artificial Sequence: Synthetic oligonucleotide
taccaagatataaggctctgga

SEQ ID NO: 2423 - DNA, 22 bp, Artificial Sequence
  Description of Artificial Sequence: Synthetic oligonucleotide
tttctggctcagaaatggcggc

SEQ ID NO: 2424 - DNA, 22 bp, Artificial Sequence
  Description of Artificial Sequence: Synthetic oligonucleotide
ttcactccagccaatatctgca

SEQ ID NO: 2425 - DNA, 22 bp, Artificial Sequence
  Description of Artificial Sequence: Synthetic oligonucleotide
tatcatcgtgaaacaatatccg

SEQ ID NO: 2426 - DNA, 22 bp, Artificial Sequence
  Description of Artificial Sequence: Synthetic oligonucleotide
taacccaatgctgtatcgaggt

SEQ ID NO: 2427 - DNA, 22 bp, Artificial Sequence
  Description of Artificial Sequence: Synthetic oligonucleotide
taagtctctcagggattctcca

SEQ ID NO: 2428 - DNA, 22 bp, Artificial Sequence
  Description of Artificial Sequence: Synthetic oligonucleotide
taacttcagcattgatttagcg

SEQ ID NO: 2429 - DNA, 22 bp, Artificial Sequence
  Description of Artificial Sequence: Synthetic oligonucleotide
tttctgttcaagctctcgtcca

SEQ ID NO: 2430 - DNA, 22 bp, Artificial Sequence
  Description of Artificial Sequence: Synthetic oligonucleotide
atattccatgcgtccatctgca

SEQ ID NO: 2431 - DNA, 22 bp, Artificial Sequence
  Description of Artificial Sequence: Synthetic oligonucleotide
taacagaatgagcaagacggca

SEQ ID NO: 2432 - DNA, 22 bp, Artificial Sequence
  Description of Artificial Sequence: Synthetic oligonucleotide
taattctgtgtgaagataagcc

SEQ ID NO: 2433 - DNA, 22 bp, Artificial Sequence
  Description of Artificial Sequence: Synthetic oligonucleotide
ttgtttgggcagagcttcggcc

SEQ ID NO: 2434 - DNA, 22 bp, Artificial Sequence
  Description of Artificial Sequence: Synthetic oligonucleotide
ttccatccacagattgtttggg

SEQ ID NO: 2435 - DNA, 22 bp, Artificial Sequence
  Description of Artificial Sequence: Synthetic oligonucleotide
ttgattcccaggcttcttcggc

SEQ ID NO: 2436 - DNA, 22 bp, Artificial Sequence
  Description of Artificial Sequence: Synthetic oligonucleotide
tattcaaatgcccgtttctgct

SEQ ID NO: 2437 - DNA, 22 bp, Artificial Sequence
  Description of Artificial Sequence: Synthetic oligonucleotide
ttacatggtgtcataactggct

SEQ ID NO: 2438 - DNA, 22 bp, Artificial Sequence
  Description of Artificial Sequence: Synthetic oligonucleotide
ttagttgtctcctttgtaggca

SEQ ID NO: 2439 - DNA, 22 bp, Artificial Sequence
  Description of Artificial Sequence: Synthetic oligonucleotide
aattctgcagagtttcttggcg

SEQ ID NO: 2440 - DNA, 22 bp, Artificial Sequence
  Description of Artificial Sequence: Synthetic oligonucleotide
ttgttgacggcctcgatgagct

SEQ ID NO: 2441 - DNA, 22 bp, Artificial Sequence
  Description of Artificial Sequence: Synthetic oligonucleotide
tatggctaagccaaagtctgcc

SEQ ID NO: 2442 - DNA, 22 bp, Artificial Sequence
  Description of Artificial Sequence: Synthetic oligonucleotide
atagagaatgacaccacatgcc

SEQ ID NO: 2443 - DNA, 22 bp, Artificial Sequence
  Description of Artificial Sequence: Synthetic oligonucleotide
tttattgatgaggtctttggct

SEQ ID NO: 2444 - DNA, 22 bp, Artificial Sequence
  Description of Artificial Sequence: Synthetic oligonucleotide
tttcttcaacaaactcttggct

SEQ ID NO: 2445 - DNA, 22 bp, Artificial Sequence
  Description of Artificial Sequence: Synthetic oligonucleotide
caaatgcaaggcaatgttggct

SEQ ID NO: 2446 - DNA, 22 bp, Artificial Sequence
  Description of Artificial Sequence: Synthetic oligonucleotide
agaaatcaccatttaatgaggt

SEQ ID NO: 2447 - DNA, 22 bp, Artificial Sequence
  Description of Artificial Sequence: Synthetic oligonucleotide
tttgctttccaaggaggaacgg

SEQ ID NO: 2448 - DNA, 22 bp, Artificial Sequence
  Description of Artificial Sequence: Synthetic oligonucleotide
ttacatttaacctccatttccc

SEQ ID NO: 2449 - DNA, 22 bp, Artificial Sequence
  Description of Artificial Sequence: Synthetic oligonucleotide
ttaggtttacatttaacctcca

SEQ ID NO: 2450 - DNA, 22 bp, Artificial Sequence
  Description of Artificial Sequence: Synthetic oligonucleotide
atactgttagtgatgtctggct

SEQ ID NO: 2451 - DNA, 22 bp, Artificial Sequence
  Description of Artificial Sequence: Synthetic oligonucleotide
ttacagatttagtgtctctggt

SEQ ID NO: 2452 - DNA, 22 bp, Artificial Sequence
  Description of Artificial Sequence: Synthetic oligonucleotide
ataaggtggaaattaagttgct

SEQ ID NO: 2453 - DNA, 22 bp, Artificial Sequence
  Description of Artificial Sequence: Synthetic oligonucleotide
attctccaatatgggatagcgg

SEQ ID NO: 2454 - DNA, 22 bp, Artificial Sequence
  Description of Artificial Sequence: Synthetic oligonucleotide
ataactttccatagtaattcca

SEQ ID NO: 2455 - DNA, 22 bp, Artificial Sequence
  Description of Artificial Sequence: Synthetic oligonucleotide
atatctagtaactgtgacaggc

SEQ ID NO: 2456 - DNA, 22 bp, Artificial Sequence
  Description of Artificial Sequence: Synthetic oligonucleotide
tatttccttcgttgatggagga

SEQ ID NO: 2457 - DNA, 22 bp, Artificial Sequence
  Description of Artificial Sequence: Synthetic oligonucleotide
ttaaggtctgatgcccagggct

SEQ ID NO: 2458 - DNA, 22 bp, Artificial Sequence
  Description of Artificial Sequence: Synthetic oligonucleotide
tttgcatacacgtctgaaggcc

SEQ ID NO: 2459 - DNA, 22 bp, Artificial Sequence
  Description of Artificial Sequence: Synthetic oligonucleotide
tttacttctgatggtcttggca

SEQ ID NO: 2460 - DNA, 22 bp, Artificial Sequence
  Description of Artificial Sequence: Synthetic oligonucleotide
atttccagatggttcataaggg

SEQ ID NO: 2461 - DNA, 22 bp, Artificial Sequence
  Description of Artificial Sequence: Synthetic oligonucleotide
tttagacactctagcctccggg

SEQ ID NO: 2462 - DNA, 22 bp, Artificial Sequence
  Description of Artificial Sequence: Synthetic oligonucleotide
tttagctttgttcaatgcccga

SEQ ID NO: 2463 - DNA, 22 bp, Artificial Sequence
  Description of Artificial Sequence: Synthetic oligonucleotide
aatagcgtgtacaatacatcct

SEQ ID NO: 2464 - DNA, 22 bp, Artificial Sequence
  Description of Artificial Sequence: Synthetic oligonucleotide
taaagctttatctttcagagca

SEQ ID NO: 2465 - DNA, 22 bp, Artificial Sequence
  Description of Artificial Sequence: Synthetic oligonucleotide
ttatcattaccaccactggcca

SEQ ID NO: 2466 - DNA, 22 bp, Artificial Sequence
  Description of Artificial Sequence: Synthetic oligonucleotide
attccagatgcgaatgtgtcga

SEQ ID NO: 2467 - DNA, 22 bp, Artificial Sequence
  Description of Artificial Sequence: Synthetic oligonucleotide
aataactagctggttctgtgca

SEQ ID NO: 2468 - DNA, 22 bp, Artificial Sequence
  Description of Artificial Sequence: Synthetic oligonucleotide
taatggactaagagctgctggt

SEQ ID NO: 2469 - DNA, 22 bp, Artificial Sequence
  Description of Artificial Sequence: Synthetic oligonucleotide
atttggatcaacttggatagct

SEQ ID NO: 2470 - DNA, 22 bp, Artificial Sequence
  Description of Artificial Sequence: Synthetic oligonucleotide
atttgcatagagggttcttggg

SEQ ID NO: 2471 - DNA, 22 bp, Artificial Sequence
  Description of Artificial Sequence: Synthetic oligonucleotide
tttaatctggttattggctcct

SEQ ID NO: 2472 - DNA, 22 bp, Artificial Sequence
  Description of Artificial Sequence: Synthetic oligonucleotide
atcctttatggtttcagtgggc

SEQ ID NO: 2473 - DNA, 22 bp, Artificial Sequence
  Description of Artificial Sequence: Synthetic oligonucleotide
atttgtccgctgctggtcacca

SEQ ID NO: 2474 - DNA, 22 bp, Artificial Sequence
  Description of Artificial Sequence: Synthetic oligonucleotide
ttcagctccgaggtgttctggc

SEQ ID NO: 2475 - DNA, 22 bp, Artificial Sequence
  Description of Artificial Sequence: Synthetic oligonucleotide
ttaaataatcgggcaaagccca

SEQ ID NO: 2476 - DNA, 22 bp, Artificial Sequence
  Description of Artificial Sequence: Synthetic oligonucleotide
attacattgaatattctgtcca

SEQ ID NO: 2477 - DNA, 22 bp, Artificial Sequence
  Description of Artificial Sequence: Synthetic oligonucleotide
attaatgttgaatgttcaggca

SEQ ID NO: 2478 - DNA, 22 bp, Artificial Sequence
  Description of Artificial Sequence: Synthetic oligonucleotide
tatatactacccttgcagcggt

SEQ ID NO: 2479 - DNA, 22 bp, Artificial Sequence
  Description of Artificial Sequence: Synthetic oligonucleotide
taggattgtgggtgggtgaggg

SEQ ID NO: 2480 - DNA, 22 bp, Artificial Sequence
  Description of Artificial Sequence: Synthetic oligonucleotide
ttctaacggaccaaactgtgcc

SEQ ID NO: 2481 - DNA, 22 bp, Artificial Sequence
  Description of Artificial Sequence: Synthetic oligonucleotide
attagtagagatatgacagggc

SEQ ID NO: 2482 - DNA, 22 bp, Artificial Sequence
  Description of Artificial Sequence: Synthetic oligonucleotide
tataggtattccaggaaggccc

SEQ ID NO: 2483 - DNA, 22 bp, Artificial Sequence
  Description of Artificial Sequence: Synthetic oligonucleotide
ttatcccatagcgatagaagcg

SEQ ID NO: 2484 - DNA, 22 bp, Artificial Sequence
  Description of Artificial Sequence: Synthetic oligonucleotide
attagttctgtcttggagggca

SEQ ID NO: 2485 - DNA, 22 bp, Artificial Sequence
  Description of Artificial Sequence: Synthetic oligonucleotide
atagataataactgtgtcagca

SEQ ID NO: 2486 - DNA, 22 bp, Artificial Sequence
  Description of Artificial Sequence: Synthetic oligonucleotide
attggatattgccttctctcct

SEQ ID NO: 2487 - DNA, 22 bp, Artificial Sequence
  Description of Artificial Sequence: Synthetic oligonucleotide
ttataccgaaatactgttgcca

SEQ ID NO: 2488 - DNA, 22 bp, Artificial Sequence
  Description of Artificial Sequence: Synthetic oligonucleotide
tttatgcagcagagctagagga

SEQ ID NO: 2489 - DNA, 22 bp, Artificial Sequence
  Description of Artificial Sequence: Synthetic oligonucleotide
atttgtctgcatccaatttggt

SEQ ID NO: 2490 - DNA, 22 bp, Artificial Sequence
  Description of Artificial Sequence: Synthetic oligonucleotide
ttattacaggacctcatctgca

SEQ ID NO: 2491 - DNA, 22 bp, Artificial Sequence
  Description of Artificial Sequence: Synthetic oligonucleotide
tttctttctgagcttgttcgga

SEQ ID NO: 2492 - DNA, 22 bp, Artificial Sequence
  Description of Artificial Sequence: Synthetic oligonucleotide
attcttcagtatctaatcgccg

SEQ ID NO: 2493 - DNA, 22 bp, Artificial Sequence
  Description of Artificial Sequence: Synthetic oligonucleotide
attcttcaggaacatcacaggc

SEQ ID NO: 2494 - DNA, 22 bp, Artificial Sequence
  Description of Artificial Sequence: Synthetic oligonucleotide
ttagtaaagaaagtatctggct

SEQ ID NO: 2495 - DNA, 22 bp, Artificial Sequence
  Description of Artificial Sequence: Synthetic oligonucleotide
tttatgtattatctttccacca

SEQ ID NO: 2496 - DNA, 22 bp, Artificial Sequence
  Description of Artificial Sequence: Synthetic oligonucleotide
taaactacaaaggctatttggt

SEQ ID NO: 2497 - DNA, 22 bp, Artificial Sequence
  Description of Artificial Sequence: Synthetic oligonucleotide
taaacttctggaagcaaatggc

SEQ ID NO: 2498 - DNA, 22 bp, Artificial Sequence
  Description of Artificial Sequence: Synthetic oligonucleotide
ataatcttctgcttacagccca

SEQ ID NO: 2499 - DNA, 22 bp, Artificial Sequence
  Description of Artificial Sequence: Synthetic oligonucleotide
attcttaatgatcttcagggca

SEQ ID NO: 2500 - DNA, 22 bp, Artificial Sequence
  Description of Artificial Sequence: Synthetic oligonucleotide
tatactccacacatcacaaggc

SEQ ID NO: 2501 - DNA, 22 bp, Artificial Sequence
  Description of Artificial Sequence: Synthetic oligonucleotide
attcacaggtatatagagagcc

SEQ ID NO: 2502 - DNA, 22 bp, Artificial Sequence
  Description of Artificial Sequence: Synthetic oligonucleotide
ttctctcctacacttaggagca

SEQ ID NO: 2503 - DNA, 22 bp, Artificial Sequence
  Description of Artificial Sequence: Synthetic oligonucleotide
aatagtaaactacaaataccct

SEQ ID NO: 2504 - DNA, 22 bp, Artificial Sequence
  Description of Artificial Sequence: Synthetic oligonucleotide
tacaccttgcactgcatctggc

SEQ ID NO: 2505 - DNA, 22 bp, Artificial Sequence
  Description of Artificial Sequence: Synthetic oligonucleotide
aaggcctacccggaacagagga

SEQ ID NO: 2506 - DNA, 22 bp, Artificial Sequence
  Description of Artificial Sequence: Synthetic oligonucleotide
atttctcgcacttcaggcaggg

SEQ ID NO: 2507 - DNA, 22 bp, Artificial Sequence
  Description of Artificial Sequence: Synthetic oligonucleotide
attccatagcagggcttgtggc

SEQ ID NO: 2508 - DNA, 22 bp, Artificial Sequence
  Description of Artificial Sequence: Synthetic oligonucleotide
taacactggcaggtgggtgggc

SEQ ID NO: 2509 - DNA, 22 bp, Artificial Sequence
  Description of Artificial Sequence: Synthetic oligonucleotide
ataaataacactggcaggtggg

SEQ ID NO: 2510 - DNA, 22 bp, Artificial Sequence
  Description of Artificial Sequence: Synthetic oligonucleotide
tttcatatgtttaagtaaccgc

SEQ ID NO: 2511 - DNA, 22 bp, Artificial Sequence
  Description of Artificial Sequence: Synthetic oligonucleotide
tttagacctcggagaatttggt

SEQ ID NO: 2512 - DNA, 22 bp, Artificial Sequence
  Description of Artificial Sequence: Synthetic oligonucleotide
atgtatatactttagacctcgg

SEQ ID NO: 2513 - DNA, 22 bp, Artificial Sequence
  Description of Artificial Sequence: Synthetic oligonucleotide
attcacagctagattactaggt

SEQ ID NO: 2514 - DNA, 22 bp, Artificial Sequence
  Description of Artificial Sequence: Synthetic oligonucleotide
ttcatcatctgtgtgccgagcc

SEQ ID NO: 2515 - DNA, 22 bp, Artificial Sequence
  Description of Artificial Sequence: Synthetic oligonucleotide
ttcttccagtcaacagctcggc

SEQ ID NO: 2516 - DNA, 22 bp, Artificial Sequence
  Description of Artificial Sequence: Synthetic oligonucleotide
aatgaatgtgctgtacggagga

SEQ ID NO: 2517 - DNA, 22 bp, Artificial Sequence
  Description of Artificial Sequence: Synthetic oligonucleotide
atttgtatagagattctttcct

SEQ ID NO: 2518 - DNA, 22 bp, Artificial Sequence
  Description of Artificial Sequence: Synthetic oligonucleotide
ttgagcgtgaaggtccggtcgc

SEQ ID NO: 2519 - DNA, 22 bp, Artificial Sequence
  Description of Artificial Sequence: Synthetic oligonucleotide
aaccagtgccgaagtaggcgcc

SEQ ID NO: 2520 - DNA, 22 bp, Artificial Sequence
  Description of Artificial Sequence: Synthetic oligonucleotide
ttgaaaccgtagagcctgggca

SEQ ID NO: 2521 - DNA, 22 bp, Artificial Sequence
  Description of Artificial Sequence: Synthetic oligonucleotide
ttattccatagaaggcggtgga

SEQ ID NO: 2522 - DNA, 22 bp, Artificial Sequence
  Description of Artificial Sequence: Synthetic oligonucleotide
atgtacagtgctcctcgatggc

SEQ ID NO: 2523 - DNA, 22 bp, Artificial Sequence
  Description of Artificial Sequence: Synthetic oligonucleotide
ttcaactctcaggaacactcgc

SEQ ID NO: 2524 - DNA, 22 bp, Artificial Sequence
  Description of Artificial Sequence: Synthetic oligonucleotide
ataagtctgaactctttcacct

SEQ ID NO: 2525 - DNA, 22 bp, Artificial Sequence
  Description of Artificial Sequence: Synthetic oligonucleotide
aagttcatgacaacaaggtgca

SEQ ID NO: 2526 - DNA, 22 bp, Artificial Sequence
  Description of Artificial Sequence: Synthetic oligonucleotide
taatcggagccctatctcagga

SEQ ID NO: 2527 - DNA, 22 bp, Artificial Sequence
  Description of Artificial Sequence: Synthetic oligonucleotide
taaatccttgaggatctttgcc

SEQ ID NO: 2528 - DNA, 22 bp, Artificial Sequence
  Description of Artificial Sequence: Synthetic oligonucleotide
tatttctctcgcatgatgtgga

SEQ ID NO: 2529 - DNA, 22 bp, Artificial Sequence
  Description of Artificial Sequence: Synthetic oligonucleotide
ttacagtaagtgcagcacaggc

SEQ ID NO: 2530 - DNA, 22 bp, Artificial Sequence
  Description of Artificial Sequence: Synthetic oligonucleotide
attcacatttgcggtgaaacgt

SEQ ID NO: 2531 - DNA, 22 bp, Artificial Sequence
  Description of Artificial Sequence: Synthetic oligonucleotide
atactgcatgacaagttcgccc

SEQ ID NO: 2532 - DNA, 22 bp, Artificial Sequence
  Description of Artificial Sequence: Synthetic oligonucleotide
ttaatcgtgcaacatggctgca

SEQ ID NO: 2533 - DNA, 22 bp, Artificial Sequence
  Description of Artificial Sequence: Synthetic oligonucleotide
ttaatccaggaatgttccaggc

SEQ ID NO: 2534 - DNA, 22 bp, Artificial Sequence
  Description of Artificial Sequence: Synthetic oligonucleotide
tttctcttggctgcagagggcc

SEQ ID NO: 2535 - DNA, 22 bp, Artificial Sequence
  Description of Artificial Sequence: Synthetic oligonucleotide
ataagagtgagtaatatcaggt

SEQ ID NO: 2536 - DNA, 22 bp, Artificial Sequence
  Description of Artificial Sequence: Synthetic oligonucleotide
tttgtgcaggactaccttgcga

SEQ ID NO: 2537 - DNA, 22 bp, Artificial Sequence
  Description of Artificial Sequence: Synthetic oligonucleotide
tatttcctgccttgtaacaggc

SEQ ID NO: 2538 - DNA, 22 bp, Artificial Sequence
  Description of Artificial Sequence: Synthetic oligonucleotide
taaattgtcattgtactggccg

SEQ ID NO: 2539 - DNA, 22 bp, Artificial Sequence
  Description of Artificial Sequence: Synthetic oligonucleotide
tatttctgactctctgagaggg

SEQ ID NO: 2540 - DNA, 22 bp, Artificial Sequence
  Description of Artificial Sequence: Synthetic oligonucleotide
tttacaaacaggatgctgtcgt

SEQ ID NO: 2541 - DNA, 22 bp, Artificial Sequence
  Description of Artificial Sequence: Synthetic oligonucleotide
ttatctcctgggatgtgctggt

SEQ ID NO: 2542 - DNA, 22 bp, Artificial Sequence
  Description of Artificial Sequence: Synthetic oligonucleotide
tttaaccatgtccttgcaggct

SEQ ID NO: 2543 - DNA, 22 bp, Artificial Sequence
  Description of Artificial Sequence: Synthetic oligonucleotide
tttgaacttggagtaggtgcgc

SEQ ID NO: 2544 - DNA, 22 bp, Artificial Sequence
  Description of Artificial Sequence: Synthetic oligonucleotide
ttgctatatgggtcataccggt

SEQ ID NO: 2545 - DNA, 22 bp, Artificial Sequence
  Description of Artificial Sequence: Synthetic oligonucleotide
tttcttcagtacaggcagggcc

SEQ ID NO: 2546 - DNA, 22 bp, Artificial Sequence
  Description of Artificial Sequence: Synthetic oligonucleotide
tttctcagcaagtcatagaggt

SEQ ID NO: 2547 - DNA, 22 bp, Artificial Sequence
  Description of Artificial Sequence: Synthetic oligonucleotide
atatactggtatatcctctgcc

SEQ ID NO: 2548 - DNA, 22 bp, Artificial Sequence
  Description of Artificial Sequence: Synthetic oligonucleotide
atatgagcaggtggaataccca

SEQ ID NO: 2549 - DNA, 22 bp, Artificial Sequence
  Description of Artificial Sequence: Synthetic oligonucleotide
tttgaacttcaagtagtcagcg

SEQ ID NO: 2550 - DNA, 22 bp, Artificial Sequence
  Description of Artificial Sequence: Synthetic oligonucleotide
tttcagcattgtgatatagcgc

SEQ ID NO: 2551 - DNA, 22 bp, Artificial Sequence
  Description of Artificial Sequence: Synthetic oligonucleotide
tttatcctccaagagaggacgg

SEQ ID NO: 2552 - DNA, 22 bp, Artificial Sequence
  Description of Artificial Sequence: Synthetic oligonucleotide
tttgataaagtctctgtgtcct

SEQ ID NO: 2553 - DNA, 22 bp, Artificial Sequence
  Description of Artificial Sequence: Synthetic oligonucleotide
tttgtagacatcctggagaggc

SEQ ID NO: 2554 - DNA, 22 bp, Artificial Sequence
  Description of Artificial Sequence: Synthetic oligonucleotide
tacagggtctcgttggtcggcc

SEQ ID NO: 2555 - DNA, 22 bp, Artificial Sequence
  Description of Artificial Sequence: Synthetic oligonucleotide
atagatgagaactttggaggct

SEQ ID NO: 2556 - DNA, 22 bp, Artificial Sequence
  Description of Artificial Sequence: Synthetic oligonucleotide
ataaagtttgatcaagacacca

SEQ ID NO: 2557 - DNA, 22 bp, Artificial Sequence
  Description of Artificial Sequence: Synthetic oligonucleotide
attaagtcccagcttgatggct

SEQ ID NO: 2558 - DNA, 22 bp, Artificial Sequence
  Description of Artificial Sequence: Synthetic oligonucleotide
taaacgtttaacatctggacca

SEQ ID NO: 2559 - DNA, 22 bp, Artificial Sequence
  Description of Artificial Sequence: Synthetic oligonucleotide
attatatagcacctttcaccca

SEQ ID NO: 2560 - DNA, 22 bp, Artificial Sequence
  Description of Artificial Sequence: Synthetic oligonucleotide
ataatctattaacgaagaagcc

SEQ ID NO: 2561 - DNA, 22 bp, Artificial Sequence
  Description of Artificial Sequence: Synthetic oligonucleotide
attgtcccggagctctagggcc

SEQ ID NO: 2562 - DNA, 22 bp, Artificial Sequence
  Description of Artificial Sequence: Synthetic oligonucleotide
ttagactctgaaatatcctccg

SEQ ID NO: 2563 - DNA, 22 bp, Artificial Sequence
  Description of Artificial Sequence: Synthetic oligonucleotide
ataagaatcacggtcaaagcca

SEQ ID NO: 2564 - DNA, 22 bp, Artificial Sequence
  Description of Artificial Sequence: Synthetic oligonucleotide
atttgctaacaattcttgagct

SEQ ID NO: 2565 - DNA, 22 bp, Artificial Sequence
  Description of Artificial Sequence: Synthetic oligonucleotide
tatgcatttatgcatttgtggt

SEQ ID NO: 2566 - DNA, 22 bp, Artificial Sequence
  Description of Artificial Sequence: Synthetic oligonucleotide
ttaacggtcagaatatattggg

SEQ ID NO: 2567 - DNA, 22 bp, Artificial Sequence
  Description of Artificial Sequence: Synthetic oligonucleotide
ataacataccagatgtcctgct

SEQ ID NO: 2568 - DNA, 22 bp, Artificial Sequence
  Description of Artificial Sequence: Synthetic oligonucleotide
atttcccaacatacagagtggg

SEQ ID NO: 2569 - DNA, 22 bp, Artificial Sequence
  Description of Artificial Sequence: Synthetic oligonucleotide
taattcctcaagtagttgagct

SEQ ID NO: 2570 - DNA, 22 bp, Artificial Sequence
  Description of Artificial Sequence: Synthetic oligonucleotide
ttctctccataaactgattccc

SEQ ID NO: 2571 - DNA, 22 bp, Artificial Sequence
  Description of Artificial Sequence: Synthetic oligonucleotide
aagagcttccacaggctgcgca

SEQ ID NO: 2572 - DNA, 22 bp, Artificial Sequence
  Description of Artificial Sequence: Synthetic oligonucleotide
tatgagctggagccgctgagga

SEQ ID NO: 2573 - DNA, 22 bp, Artificial Sequence
  Description of Artificial Sequence: Synthetic oligonucleotide
attgtttctgcccggaagagga

SEQ ID NO: 2574 - DNA, 22 bp, Artificial Sequence
  Description of Artificial Sequence: Synthetic oligonucleotide
ttgattagtggtactaagagct

SEQ ID NO: 2575 - DNA, 22 bp, Artificial Sequence
  Description of Artificial Sequence: Synthetic oligonucleotide
attcttcatctcttgggtccct

SEQ ID NO: 2576 - DNA, 22 bp, Artificial Sequence
  Description of Artificial Sequence: Synthetic oligonucleotide
ataactccatagacaaagagca

SEQ ID NO: 2577 - DNA, 22 bp, Artificial Sequence
  Description of Artificial Sequence: Synthetic oligonucleotide
tttgtgtacaaatgtaaaggct

SEQ ID NO: 2578 - DNA, 22 bp, Artificial Sequence
  Description of Artificial Sequence: Synthetic oligonucleotide
ttaagccagcggatggtgggcg

SEQ ID NO: 2579 - DNA, 22 bp, Artificial Sequence
  Description of Artificial Sequence: Synthetic oligonucleotide
atagggtccgaaggtcaggcgg

SEQ ID NO: 2580 - DNA, 22 bp, Artificial Sequence
  Description of Artificial Sequence: Synthetic oligonucleotide
ttgagaaacactacagagggct

SEQ ID NO: 2581 - DNA, 22 bp, Artificial Sequence
  Description of Artificial Sequence: Synthetic oligonucleotide
aaggtgagagaggtcccatgga

SEQ ID NO: 2582 - DNA, 22 bp, Artificial Sequence
  Description of Artificial Sequence: Synthetic oligonucleotide
taaagcttgcttgtatttacct

SEQ ID NO: 2583 - DNA, 22 bp, Artificial Sequence
  Description of Artificial Sequence: Synthetic oligonucleotide
ttatactgtagtaaagcttgct

SEQ ID NO: 2584 - DNA, 22 bp, Artificial Sequence
  Description of Artificial Sequence: Synthetic oligonucleotide
taagtcagtgacttaaacagcc

SEQ ID NO: 2585 - DNA, 22 bp, Artificial Sequence
  Description of Artificial Sequence: Synthetic oligonucleotide
atttgactgggcgtggtgtgct

SEQ ID NO: 2586 - DNA, 22 bp, Artificial Sequence
  Description of Artificial Sequence: Synthetic oligonucleotide
attgaggacaagagtatggcct

SEQ ID NO: 2587 - DNA, 22 bp, Artificial Sequence
  Description of Artificial Sequence: Synthetic oligonucleotide
ttaaccatacaacttccggcga

SEQ ID NO: 2588 - DNA, 22 bp, Artificial Sequence
  Description of Artificial Sequence: Synthetic oligonucleotide
ataaatatcccgggcaaggcca

SEQ ID NO: 2589 - DNA, 22 bp, Artificial Sequence
  Description of Artificial Sequence: Synthetic oligonucleotide
atttgcttgaagcaaatcacct

SEQ ID NO: 2590 - DNA, 22 bp, Artificial Sequence
  Description of Artificial Sequence: Synthetic oligonucleotide
ttccattgtcataacaaccggg

SEQ ID NO: 2591 - DNA, 22 bp, Artificial Sequence
  Description of Artificial Sequence: Synthetic oligonucleotide
atcaacaatgcactgatctcga

SEQ ID NO: 2592 - DNA, 22 bp, Artificial Sequence
  Description of Artificial Sequence: Synthetic oligonucleotide
atataatagttgtttctctgca

SEQ ID NO: 2593 - DNA, 22 bp, Artificial Sequence
  Description of Artificial Sequence: Synthetic oligonucleotide
atttggatccattgaacctggt

SEQ ID NO: 2594 - DNA, 22 bp, Artificial Sequence
  Description of Artificial Sequence: Synthetic oligonucleotide
tattactacgaatggcttcggg

SEQ ID NO: 2595 - DNA, 22 bp, Artificial Sequence
  Description of Artificial Sequence: Synthetic oligonucleotide
tatccttacattgcacacagcc

SEQ ID NO: 2596 - DNA, 22 bp, Artificial Sequence
  Description of Artificial Sequence: Synthetic oligonucleotide
aactcaggtcatcttctgtccg

SEQ ID NO: 2597 - DNA, 22 bp, Artificial Sequence
  Description of Artificial Sequence: Synthetic oligonucleotide
ataatgtttgacatggtctcct

SEQ ID NO: 2598 - DNA, 22 bp, Artificial Sequence
  Description of Artificial Sequence: Synthetic oligonucleotide
aatgagggccatggaagttcgt

SEQ ID NO: 2599 - DNA, 22 bp, Artificial Sequence
  Description of Artificial Sequence: Synthetic oligonucleotide
ttagcactagtactgaagtccg

SEQ ID NO: 2600 - DNA, 22 bp, Artificial Sequence
  Description of Artificial Sequence: Synthetic oligonucleotide
tttagccaggagcttcgcagcc

SEQ ID NO: 2601 - DNA, 22 bp, Artificial Sequence
  Description of Artificial Sequence: Synthetic oligonucleotide
tttgctagaaagctgggcagct

SEQ ID NO: 2602 - DNA, 22 bp, Artificial Sequence
  Description of Artificial Sequence: Synthetic oligonucleotide
ttaagtgggaacttgctgaggt

SEQ ID NO: 2603 - DNA, 22 bp, Artificial Sequence
  Description of Artificial Sequence: Synthetic oligonucleotide
tacatgtcactgttggaaccct

SEQ ID NO: 2604 - DNA, 22 bp, Artificial Sequence
  Description of Artificial Sequence: Synthetic oligonucleotide
tttctctagcttcttgcaggca

SEQ ID NO: 2605 - DNA, 22 bp, Artificial Sequence
  Description of Artificial Sequence: Synthetic oligonucleotide
atatggcaactttaaggaggcg

SEQ ID NO: 2606 - DNA, 22 bp, Artificial Sequence
  Description of Artificial Sequence: Synthetic oligonucleotide
tttcttctgccttggctctggg

SEQ ID NO: 2607 - DNA, 22 bp, Artificial Sequence
  Description of Artificial Sequence: Synthetic oligonucleotide
tttattgtgaatggtaacagct

SEQ ID NO: 2608 - DNA, 22 bp, Artificial Sequence
  Description of Artificial Sequence: Synthetic oligonucleotide
atacgaaacattgggttctcct

SEQ ID NO: 2609 - DNA, 22 bp, Artificial Sequence
  Description of Artificial Sequence: Synthetic oligonucleotide
attggttgtcctagtaacagct

SEQ ID NO: 2610 - DNA, 22 bp, Artificial Sequence
  Description of Artificial Sequence: Synthetic oligonucleotide
tttaaattctgtgtagtttggg

SEQ ID NO: 2611 - DNA, 22 bp, Artificial Sequence
  Description of Artificial Sequence: Synthetic oligonucleotide
aataaggatggtagccagaggt

SEQ ID NO: 2612 - DNA, 22 bp, Artificial Sequence
  Description of Artificial Sequence: Synthetic oligonucleotide
attcctcctaatcctcgctggt

SEQ ID NO: 2613 - DNA, 22 bp, Artificial Sequence
  Description of Artificial Sequence: Synthetic oligonucleotide
ttcgttatgagtcttaaagcgt

SEQ ID NO: 2614 - DNA, 22 bp, Artificial Sequence
  Description of Artificial Sequence: Synthetic oligonucleotide
atattgcattcaagactatggg

SEQ ID NO: 2615 - DNA, 22 bp, Artificial Sequence
  Description of Artificial Sequence: Synthetic oligonucleotide
ttagagcttcattcactgtcca

SEQ ID NO: 2616 - DNA, 22 bp, Artificial Sequence
  Description of Artificial Sequence: Synthetic oligonucleotide
atatgtacagattgtaacaggg

SEQ ID NO: 2617 - DNA, 22 bp, Artificial Sequence
  Description of Artificial Sequence: Synthetic oligonucleotide
tttcctaaggacttccattgca

SEQ ID NO: 2618 - DNA, 22 bp, Artificial Sequence
  Description of Artificial Sequence: Synthetic oligonucleotide
ttctagctggtttgtctgcgga

SEQ ID NO: 2619 - DNA, 22 bp, Artificial Sequence
  Description of Artificial Sequence: Synthetic oligonucleotide
tttgagtagagcagcatccgga

SEQ ID NO: 2620 - DNA, 22 bp, Artificial Sequence
  Description of Artificial Sequence: Synthetic oligonucleotide
atatctatgcttcccatctcgc

SEQ ID NO: 2621 - DNA, 22 bp, Artificial Sequence
  Description of Artificial Sequence: Synthetic oligonucleotide
atatagatatctatgcttccca

SEQ ID NO: 2622 - DNA, 22 bp, Artificial Sequence
  Description of Artificial Sequence: Synthetic oligonucleotide
ttatacttccaagcatcatcca

SEQ ID NO: 2623 - DNA, 22 bp, Artificial Sequence
  Description of Artificial Sequence: Synthetic oligonucleotide
ttaaatcaagaccagatgtgga

SEQ ID NO: 2624 - DNA, 22 bp, Artificial Sequence
  Description of Artificial Sequence: Synthetic oligonucleotide
aataacaagctgatcctgcggc

SEQ ID NO: 2625 - DNA, 22 bp, Artificial Sequence
  Description of Artificial Sequence: Synthetic oligonucleotide
tatcataggaatcaacaggcct

SEQ ID NO: 2626 - DNA, 22 bp, Artificial Sequence
  Description of Artificial Sequence: Synthetic oligonucleotide
atatcataggaatcaacaggcc

SEQ ID NO: 2627 - DNA, 22 bp, Artificial Sequence
  Description of Artificial Sequence: Synthetic oligonucleotide
ttatagatctacatgagcagca

SEQ ID NO: 2628 - DNA, 22 bp, Artificial Sequence
  Description of Artificial Sequence: Synthetic oligonucleotide
attgaattgcctaatatatgcg

SEQ ID NO: 2629 - DNA, 22 bp, Artificial Sequence
  Description of Artificial Sequence: Synthetic oligonucleotide
tttcaatgaaggagttacacct

SEQ ID NO: 2630 - DNA, 22 bp, Artificial Sequence
  Description of Artificial Sequence: Synthetic oligonucleotide
tactccttggcgcggaggaggt

SEQ ID NO: 2631 - DNA, 22 bp, Artificial Sequence
  Description of Artificial Sequence: Synthetic oligonucleotide
ttcaggtagtagtccatgacgc

SEQ ID NO: 2632 - DNA, 22 bp, Artificial Sequence
  Description of Artificial Sequence: Synthetic oligonucleotide
aatatccagctgctgctgtgga

SEQ ID NO: 2633 - DNA, 22 bp, Artificial Sequence
  Description of Artificial Sequence: Synthetic oligonucleotide
tatccaataggtctatccggct

SEQ ID NO: 2634 - DNA, 22 bp, Artificial Sequence
  Description of Artificial Sequence: Synthetic oligonucleotide
aatagcattgctgtaatgacgg

SEQ ID NO: 2635 - DNA, 22 bp, Artificial Sequence
  Description of Artificial Sequence: Synthetic oligonucleotide
atagagtacaggaagagatggc

SEQ ID NO: 2636 - DNA, 22 bp, Artificial Sequence
  Description of Artificial Sequence: Synthetic oligonucleotide
taagtagctgagataatgcgct

SEQ ID NO: 2637 - DNA, 22 bp, Artificial Sequence
  Description of Artificial Sequence: Synthetic oligonucleotide
atatcgatgagctctgacaggc

SEQ ID NO: 2638 - DNA, 22 bp, Artificial Sequence
  Description of Artificial Sequence: Synthetic oligonucleotide
atatttgccatcattcattgct

SEQ ID NO: 2639 - DNA, 22 bp, Artificial Sequence
  Description of Artificial Sequence: Synthetic oligonucleotide
atacttactcacagcattccga

SEQ ID NO: 2640 - DNA, 22 bp, Artificial Sequence
  Description of Artificial Sequence: Synthetic oligonucleotide
ttatagctggtgactgaagggc

SEQ ID NO: 2641 - DNA, 22 bp, Artificial Sequence
  Description of Artificial Sequence: Synthetic oligonucleotide
ataaagatccaacatctgtgcc

SEQ ID NO: 2642 - DNA, 22 bp, Artificial Sequence
  Description of Artificial Sequence: Synthetic oligonucleotide
attactgttcagctgaatggcc

SEQ ID NO: 2643 - DNA, 22 bp, Artificial Sequence
  Description of Artificial Sequence: Synthetic oligonucleotide
ataataatggactggtgaggcg

SEQ ID NO: 2644 - DNA, 22 bp, Artificial Sequence
  Description of Artificial Sequence: Synthetic oligonucleotide
ataatctatcaaggctactgct

SEQ ID NO: 2645 - DNA, 22 bp, Artificial Sequence
  Description of Artificial Sequence: Synthetic oligonucleotide
ttacttcaacagacactgagga

SEQ ID NO: 2646 - DNA, 22 bp, Artificial Sequence
  Description of Artificial Sequence: Synthetic oligonucleotide
ttacttctggatatagcatggg

SEQ ID NO: 2647 - DNA, 22 bp, Artificial Sequence
  Description of Artificial Sequence: Synthetic oligonucleotide
ttagttaatcagaaatactggc

SEQ ID NO: 2648 - DNA, 22 bp, Artificial Sequence
  Description of Artificial Sequence: Synthetic oligonucleotide
ttaaagaagttcccaaatccca

SEQ ID NO: 2649 - DNA, 22 bp, Artificial Sequence
  Description of Artificial Sequence: Synthetic oligonucleotide
ttggagtatcaatacaattccc

SEQ ID NO: 2650 - DNA, 22 bp, Artificial Sequence
  Description of Artificial Sequence: Synthetic oligonucleotide
tttctgtagtaccttcactgca

SEQ ID NO: 2651 - DNA, 22 bp, Artificial Sequence
  Description of Artificial Sequence: Synthetic oligonucleotide
tttccgaagcacttcaggtgcc

SEQ ID NO: 2652 - DNA, 22 bp, Artificial Sequence
  Description of Artificial Sequence: Synthetic oligonucleotide
ttgcaggaggtcacaggcggcc

SEQ ID NO: 2653 - DNA, 22 bp, Artificial Sequence
  Description of Artificial Sequence: Synthetic oligonucleotide
atatcttgccatttctcatggg

SEQ ID NO: 2654 - DNA, 22 bp, Artificial Sequence
  Description of Artificial Sequence: Synthetic oligonucleotide
atattccatcaccaaccaagca

SEQ ID NO: 2655 - DNA, 22 bp, Artificial Sequence
  Description of Artificial Sequence: Synthetic oligonucleotide
atatttcctgctttaatatccc

SEQ ID NO: 2656 - DNA, 22 bp, Artificial Sequence
  Description of Artificial Sequence: Synthetic oligonucleotide
ataacctgacatctgttcccgc

SEQ ID NO: 2657 - DNA, 22 bp, Artificial Sequence
  Description of Artificial Sequence: Synthetic oligonucleotide
taaacggatcagatccatgcgt

SEQ ID NO: 2658 - DNA, 22 bp, Artificial Sequence
  Description of Artificial Sequence: Synthetic oligonucleotide
taaatctgtaaatccagttgct

SEQ ID NO: 2659 - DNA, 22 bp, Artificial Sequence
  Description of Artificial Sequence: Synthetic oligonucleotide
tttactaacaacaaagtatgct

SEQ ID NO: 2660 - DNA, 22 bp, Artificial Sequence
  Description of Artificial Sequence: Synthetic oligonucleotide
ttattactgggcagctgatgca

SEQ ID NO: 2661 - DNA, 22 bp, Artificial Sequence
  Description of Artificial Sequence: Synthetic oligonucleotide
ttaaacagtgatggaggtacca

SEQ ID NO: 2662 - DNA, 22 bp, Artificial Sequence
  Description of Artificial Sequence: Synthetic oligonucleotide
tatggcttatagaacatggccc

SEQ ID NO: 2663 - DNA, 22 bp, Artificial Sequence
  Description of Artificial Sequence: Synthetic oligonucleotide
tttctgagtacagggaccgggc

SEQ ID NO: 2664 - DNA, 22 bp, Artificial Sequence
  Description of Artificial Sequence: Synthetic oligonucleotide
atagagtataaggacacaagca

SEQ ID NO: 2665 - DNA, 22 bp, Artificial Sequence
  Description of Artificial Sequence: Synthetic oligonucleotide
ttaaaccacctctgtatttgct

SEQ ID NO: 2666 - DNA, 22 bp, Artificial Sequence
  Description of Artificial Sequence: Synthetic oligonucleotide
aataagcaaggcttaaattggg

SEQ ID NO: 2667 - DNA, 22 bp, Artificial Sequence
  Description of Artificial Sequence: Synthetic oligonucleotide
atttaagtccaaataaacaggc

SEQ ID NO: 2668 - DNA, 22 bp, Artificial Sequence
  Description of Artificial Sequence: Synthetic oligonucleotide
taaacatctggaccagtttgct

SEQ ID NO: 2669 - DNA, 22 bp, Artificial Sequence
  Description of Artificial Sequence: Synthetic oligonucleotide
aatccaactggcatatgacggc

SEQ ID NO: 2670 - DNA, 22 bp, Artificial Sequence
  Description of Artificial Sequence: Synthetic oligonucleotide
tttctccactaaatgaaaccca

SEQ ID NO: 2671 - DNA, 22 bp, Artificial Sequence
  Description of Artificial Sequence: Synthetic oligonucleotide
tttcttaaacagtgccagtggg

SEQ ID NO: 2672 - DNA, 22 bp, Artificial Sequence
  Description of Artificial Sequence: Synthetic oligonucleotide
ttaggaattaagtttgtgtcgt

SEQ ID NO: 2673 - DNA, 22 bp, Artificial Sequence
  Description of Artificial Sequence: Synthetic oligonucleotide
aatgatagtgaggtccattgcc

SEQ ID NO: 2674 - DNA, 22 bp, Artificial Sequence
  Description of Artificial Sequence: Synthetic oligonucleotide
aataggagcaacggaagcagct

SEQ ID NO: 2675 - DNA, 22 bp, Artificial Sequence
  Description of Artificial Sequence: Synthetic oligonucleotide
ttcttgttcccatccgtatggc

SEQ ID NO: 2676 - DNA, 22 bp, Artificial Sequence
  Description of Artificial Sequence: Synthetic oligonucleotide
attatcatccacagtaaacgcc

SEQ ID NO: 2677 - DNA, 22 bp, Artificial Sequence
  Description of Artificial Sequence: Synthetic oligonucleotide
ttctctctccactttgatggct

SEQ ID NO: 2678 - DNA, 22 bp, Artificial Sequence
  Description of Artificial Sequence: Synthetic oligonucleotide
atgaagtcccatttaccacggg

SEQ ID NO: 2679 - DNA, 22 bp, Artificial Sequence
  Description of Artificial Sequence: Synthetic oligonucleotide
tacctctagattgtccaaagcc

SEQ ID NO: 2680 - DNA, 22 bp, Artificial Sequence
  Description of Artificial Sequence: Synthetic oligonucleotide
taactttccttctttatcaggc

SEQ ID NO: 2681 - DNA, 22 bp, Artificial Sequence
  Description of Artificial Sequence: Synthetic oligonucleotide
ataacaggtgtatttctcgggc

SEQ ID NO: 2682 - DNA, 22 bp, Artificial Sequence
  Description of Artificial Sequence: Synthetic oligonucleotide
atacctgttgaggagtaatggt

SEQ ID NO: 2683 - DNA, 22 bp, Artificial Sequence
  Description of Artificial Sequence: Synthetic oligonucleotide
atttctgacagcggaatttcct

SEQ ID NO: 2684 - DNA, 22 bp, Artificial Sequence
  Description of Artificial Sequence: Synthetic oligonucleotide
tttgtcaatgaccttaactgcc

SEQ ID NO: 2685 - DNA, 22 bp, Artificial Sequence
  Description of Artificial Sequence: Synthetic oligonucleotide
atcttcaaagatctcaaatggg

SEQ ID NO: 2686 - DNA, 22 bp, Artificial Sequence
  Description of Artificial Sequence: Synthetic oligonucleotide
aagtgtcaacatagtgatggca

SEQ ID NO: 2687 - DNA, 22 bp, Artificial Sequence
  Description of Artificial Sequence: Synthetic oligonucleotide
ttgtctttctgaagaaattccc

SEQ ID NO: 2688 - DNA, 22 bp, Artificial Sequence
  Description of Artificial Sequence: Synthetic oligonucleotide
taagacagaaataatgcacgct

SEQ ID NO: 2689 - DNA, 22 bp, Artificial Sequence
  Description of Artificial Sequence: Synthetic oligonucleotide
ttctaataaggaaggttctggc

SEQ ID NO: 2690 - DNA, 22 bp, Artificial Sequence
  Description of Artificial Sequence: Synthetic oligonucleotide
ttaaggtggaagaatccttggt

SEQ ID NO: 2691 - DNA, 22 bp, Artificial Sequence
  Description of Artificial Sequence: Synthetic oligonucleotide
atcagtgggcagctcatagcgg

SEQ ID NO: 2692 - DNA, 22 bp, Artificial Sequence
  Description of Artificial Sequence: Synthetic oligonucleotide
ataagtgtcgtcatcagtgggc

SEQ ID NO: 2693 - DNA, 22 bp, Artificial Sequence
  Description of Artificial Sequence: Synthetic oligonucleotide
tataggccacttctgctcacct

SEQ ID NO: 2694 - DNA, 22 bp, Artificial Sequence
  Description of Artificial Sequence: Synthetic oligonucleotide
tataagtttaaggctccctgga

SEQ ID NO: 2695 - DNA, 22 bp, Artificial Sequence
  Description of Artificial Sequence: Synthetic oligonucleotide
aattctgatggctgtctgacct

SEQ ID NO: 2696 - DNA, 22 bp, Artificial Sequence
  Description of Artificial Sequence: Synthetic oligonucleotide
ataaggaaccaggaagaatccc

SEQ ID NO: 2697 - DNA, 22 bp, Artificial Sequence
  Description of Artificial Sequence: Synthetic oligonucleotide
tttctggatctcttgaaggcgc

SEQ ID NO: 2698 - DNA, 22 bp, Artificial Sequence
  Description of Artificial Sequence: Synthetic oligonucleotide
atatcaaatgtcctgttatggt

SEQ ID NO: 2699 - DNA, 22 bp, Artificial Sequence
  Description of Artificial Sequence: Synthetic oligonucleotide
ttcacaatagtgatataatgcc

SEQ ID NO: 2700 - DNA, 22 bp, Artificial Sequence
  Description of Artificial Sequence: Synthetic oligonucleotide
attcctgataaggaacaatgcc

SEQ ID NO: 2701 - DNA, 22 bp, Artificial Sequence
  Description of Artificial Sequence: Synthetic oligonucleotide
tagtgtatggaagttaagtggc

SEQ ID NO: 2702 - DNA, 22 bp, Artificial Sequence
  Description of Artificial Sequence: Synthetic oligonucleotide
ttgcctctaaacaaggcaaggt

SEQ ID NO: 2703 - DNA, 22 bp, Artificial Sequence
  Description of Artificial Sequence: Synthetic oligonucleotide
ttaaacattacttctacagcct

SEQ ID NO: 2704 - DNA, 22 bp, Artificial Sequence
  Description of Artificial Sequence: Synthetic oligonucleotide
tattacctatgacgacgctgct

SEQ ID NO: 2705 - DNA, 22 bp, Artificial Sequence
  Description of Artificial Sequence: Synthetic oligonucleotide
atactttaaatctttcagtggg

SEQ ID NO: 2706 - DNA, 22 bp, Artificial Sequence
  Description of Artificial Sequence: Synthetic oligonucleotide
attaggttgatgactctgacct

SEQ ID NO: 2707 - DNA, 22 bp, Artificial Sequence
  Description of Artificial Sequence: Synthetic oligonucleotide
tttcctcaattcaaagtgtcca

SEQ ID NO: 2708 - DNA, 22 bp, Artificial Sequence
  Description of Artificial Sequence: Synthetic oligonucleotide
atctataaaccacacaacagga

SEQ ID NO: 2709 - DNA, 22 bp, Artificial Sequence
  Description of Artificial Sequence: Synthetic oligonucleotide
tattagtgcaagagaaccagat

SEQ ID NO: 2710 - DNA, 22 bp, Artificial Sequence
  Description of Artificial Sequence: Synthetic oligonucleotide
tttagttacactgttgactcct

SEQ ID NO: 2711 - DNA, 22 bp, Artificial Sequence
  Description of Artificial Sequence: Synthetic oligonucleotide
ataatccaggtgtgggtcgcct

SEQ ID NO: 2712 - DNA, 22 bp, Artificial Sequence
  Description of Artificial Sequence: Synthetic oligonucleotide
ttccagctgcggaaggtctgcc

SEQ ID NO: 2713 - DNA, 22 bp, Artificial Sequence
  Description of Artificial Sequence: Synthetic oligonucleotide
atcgtgtaccacttcttcagga

SEQ ID NO: 2714 - DNA, 22 bp, Artificial Sequence
  Description of Artificial Sequence: Synthetic oligonucleotide
atctattgataataaagctcca

SEQ ID NO: 2715 - DNA, 22 bp, Artificial Sequence
  Description of Artificial Sequence: Synthetic oligonucleotide
ttggccatggagtctatgagct

SEQ ID NO: 2716 - DNA, 22 bp, Artificial Sequence
  Description of Artificial Sequence: Synthetic oligonucleotide
ttataatagtccttggcgagca

SEQ ID NO: 2717 - DNA, 22 bp, Artificial Sequence
  Description of Artificial Sequence: Synthetic oligonucleotide
ttatagtcagagtctttggcca

SEQ ID NO: 2718 - DNA, 22 bp, Artificial Sequence
  Description of Artificial Sequence: Synthetic oligonucleotide
ttgatcttcccttctgattcct

SEQ ID NO: 2719 - DNA, 22 bp, Artificial Sequence
  Description of Artificial Sequence: Synthetic oligonucleotide
tttgatgatctgtattgtccct

SEQ ID NO: 2720 - DNA, 22 bp, Artificial Sequence
  Description of Artificial Sequence: Synthetic oligonucleotide
atttctattgatactctgggcc

SEQ ID NO: 2721 - DNA, 22 bp, Artificial Sequence
  Description of Artificial Sequence: Synthetic oligonucleotide
taactgttccatcttcagaggt

SEQ ID NO: 2722 - DNA, 22 bp, Artificial Sequence
  Description of Artificial Sequence: Synthetic oligonucleotide
taaattaaagtcaccaacagcc

SEQ ID NO: 2723 - DNA, 22 bp, Artificial Sequence
  Description of Artificial Sequence: Synthetic oligonucleotide
taactttcaagaagagcgtcct

SEQ ID NO: 2724 - DNA, 22 bp, Artificial Sequence
  Description of Artificial Sequence: Synthetic oligonucleotide
taacatatcaagctacagagga

SEQ ID NO: 2725 - DNA, 22 bp, Artificial Sequence
  Description of Artificial Sequence: Synthetic oligonucleotide
tatccagatcatcaaatacggc

SEQ ID NO: 2726 - DNA, 22 bp, Artificial Sequence
  Description of Artificial Sequence: Synthetic oligonucleotide
tttgtcgataatcttgatggca

SEQ ID NO: 2727 - DNA, 22 bp, Artificial Sequence
  Description of Artificial Sequence: Synthetic oligonucleotide
aatctgtcggaacttggctcga

SEQ ID NO: 2728 - DNA, 22 bp, Artificial Sequence
  Description of Artificial Sequence: Synthetic oligonucleotide
atttggcaacagtgacgggcgc

SEQ ID NO: 2729 - DNA, 22 bp, Artificial Sequence
  Description of Artificial Sequence: Synthetic oligonucleotide
tttgatcccaaggtagatggca

SEQ ID NO: 2730 - DNA, 22 bp, Artificial Sequence
  Description of Artificial Sequence: Synthetic oligonucleotide
tttaggaaagaagaacaagcca

SEQ ID NO: 2731 - DNA, 22 bp, Artificial Sequence
  Description of Artificial Sequence: Synthetic oligonucleotide
tttctctcctctatcaggacct

SEQ ID NO: 2732 - DNA, 22 bp, Artificial Sequence
  Description of Artificial Sequence: Synthetic oligonucleotide
aattcagaatacttacaatggc

SEQ ID NO: 2733 - DNA, 22 bp, Artificial Sequence
  Description of Artificial Sequence: Synthetic oligonucleotide
attactcatcattggcttccct

SEQ ID NO: 2734 - DNA, 22 bp, Artificial Sequence
  Description of Artificial Sequence: Synthetic oligonucleotide
attctgaagcagctttaaaggc

SEQ ID NO: 2735 - DNA, 22 bp, Artificial Sequence
  Description of Artificial Sequence: Synthetic oligonucleotide
tttacagaacaagttaaatcct

SEQ ID NO: 2736 - DNA, 22 bp, Artificial Sequence
  Description of Artificial Sequence: Synthetic oligonucleotide
atatttaacggatgtccctggc

SEQ ID NO: 2737 - DNA, 22 bp, Artificial Sequence
  Description of Artificial Sequence: Synthetic oligonucleotide
ttctgatagtggttgaaggccg

SEQ ID NO: 2738 - DNA, 22 bp, Artificial Sequence
  Description of Artificial Sequence: Synthetic oligonucleotide
aagtcctaggaggctccagggc

SEQ ID NO: 2739 - DNA, 22 bp, Artificial Sequence
  Description of Artificial Sequence: Synthetic oligonucleotide
ttatttagtctgatcaatggcc

SEQ ID NO: 2740 - DNA, 22 bp, Artificial Sequence
  Description of Artificial Sequence: Synthetic oligonucleotide
taaagaaatcattgacgttggc

SEQ ID NO: 2741 - DNA, 22 bp, Artificial Sequence
  Description of Artificial Sequence: Synthetic oligonucleotide
atatatgctcgcttaaacacct

SEQ ID NO: 2742 - DNA, 22 bp, Artificial Sequence
  Description of Artificial Sequence: Synthetic oligonucleotide
tatggttctcattctatttgcc

SEQ ID NO: 2743 - DNA, 22 bp, Artificial Sequence
  Description of Artificial Sequence: Synthetic oligonucleotide
taatcagatgacctcagatggg

SEQ ID NO: 2744 - DNA, 22 bp, Artificial Sequence
  Description of Artificial Sequence: Synthetic oligonucleotide
ataatccatgtcacatcttggt

SEQ ID NO: 2745 - DNA, 22 bp, Artificial Sequence
  Description of Artificial Sequence: Synthetic oligonucleotide
aatgaaagcaagactccgcggc

SEQ ID NO: 2746 - DNA, 22 bp, Artificial Sequence
  Description of Artificial Sequence: Synthetic oligonucleotide
attgacaagcacaaagctggcc

SEQ ID NO: 2747 - DNA, 22 bp, Artificial Sequence
  Description of Artificial Sequence: Synthetic oligonucleotide
tttattcattggaaactgggcc

SEQ ID NO: 2748 - DNA, 22 bp, Artificial Sequence
  Description of Artificial Sequence: Synthetic oligonucleotide
attgttatatagtgtattggct

SEQ ID NO: 2749 - DNA, 22 bp, Artificial Sequence
  Description of Artificial Sequence: Synthetic oligonucleotide
aattctgtagactgattgaggg

SEQ ID NO: 2750 - DNA, 22 bp, Artificial Sequence
  Description of Artificial Sequence: Synthetic oligonucleotide
atttctccaagaagtctgcggg

SEQ ID NO: 2751 - DNA, 22 bp, Artificial Sequence
  Description of Artificial Sequence: Synthetic oligonucleotide
tttgtctcaggctgtgcctggg

SEQ ID NO: 2752 - DNA, 22 bp, Artificial Sequence
  Description of Artificial Sequence: Synthetic oligonucleotide
tttatggatcttgcccagagct

SEQ ID NO: 2753 - DNA, 22 bp, Artificial Sequence
  Description of Artificial Sequence: Synthetic oligonucleotide
tttattgcaggttccaaccggg

SEQ ID NO: 2754 - DNA, 22 bp, Artificial Sequence
  Description of Artificial Sequence: Synthetic oligonucleotide
tttatatctgctagctctagct

SEQ ID NO: 2755 - DNA, 22 bp, Artificial Sequence
  Description of Artificial Sequence: Synthetic oligonucleotide
tttcaatcgaacagatgatgct

SEQ ID NO: 2756 - DNA, 22 bp, Artificial Sequence
  Description of Artificial Sequence: Synthetic oligonucleotide
tattaatccactgatcttccct

SEQ ID NO: 2757 - DNA, 22 bp, Artificial Sequence
  Description of Artificial Sequence: Synthetic oligonucleotide
ttctgctttaacttgatactcc

SEQ ID NO: 2758 - DNA, 22 bp, Artificial Sequence
  Description of Artificial Sequence: Synthetic oligonucleotide
attcatatagcaagtatttccc

SEQ ID NO: 2759 - DNA, 22 bp, Artificial Sequence
  Description of Artificial Sequence: Synthetic oligonucleotide
ttcacaaagaaattcctgagcg

SEQ ID NO: 2760 - DNA, 22 bp, Artificial Sequence
  Description of Artificial Sequence: Synthetic oligonucleotide
tatatctacctgacaagctgga

SEQ ID NO: 2761 - DNA, 22 bp, Artificial Sequence
  Description of Artificial Sequence: Synthetic oligonucleotide
ttattctgtaaccctataaccc

SEQ ID NO: 2762 - DNA, 22 bp, Artificial Sequence
  Description of Artificial Sequence: Synthetic oligonucleotide
tttcagaaagcatcacaatgct

SEQ ID NO: 2763 - DNA, 22 bp, Artificial Sequence
  Description of Artificial Sequence: Synthetic oligonucleotide
tattctcccattatggacagca

SEQ ID NO: 2764 - DNA, 22 bp, Artificial Sequence
  Description of Artificial Sequence: Synthetic oligonucleotide
atctagtaggctatactcacct

SEQ ID NO: 2765 - DNA, 22 bp, Artificial Sequence
  Description of Artificial Sequence: Synthetic oligonucleotide
aatagttatcaactggtgtccc

SEQ ID NO: 2766 - DNA, 22 bp, Artificial Sequence
  Description of Artificial Sequence: Synthetic oligonucleotide
tttcatctacagggtccacgga

SEQ ID NO: 2767 - DNA, 22 bp, Artificial Sequence
  Description of Artificial Sequence: Synthetic oligonucleotide
tttgaacatagcattcctgggc

SEQ ID NO: 2768 - DNA, 22 bp, Artificial Sequence
  Description of Artificial Sequence: Synthetic oligonucleotide
ttattaaacaagtaaggctggt

SEQ ID NO: 2769 - DNA, 22 bp, Artificial Sequence
  Description of Artificial Sequence: Synthetic oligonucleotide
taaataatgcattcctttggct

SEQ ID NO: 2770 - DNA, 22 bp, Artificial Sequence
  Description of Artificial Sequence: Synthetic oligonucleotide
ataccattcaccagactgtgga

SEQ ID NO: 2771 - DNA, 22 bp, Artificial Sequence
  Description of Artificial Sequence: Synthetic oligonucleotide
taccagaatagtatgattccca

SEQ ID NO: 2772 - DNA, 22 bp, Artificial Sequence
  Description of Artificial Sequence: Synthetic oligonucleotide
aacataagagagacaatgcggc

SEQ ID NO: 2773 - DNA, 22 bp, Artificial Sequence
  Description of Artificial Sequence: Synthetic oligonucleotide
tacttgatgaagatggtgagca

SEQ ID NO: 2774 - DNA, 22 bp, Artificial Sequence
  Description of Artificial Sequence: Synthetic oligonucleotide
ttgatgaagcctgtaaacagct

SEQ ID NO: 2775 - DNA, 22 bp, Artificial Sequence
  Description of Artificial Sequence: Synthetic oligonucleotide
taatcatctgaaactgtctcca

SEQ ID NO: 2776 - DNA, 22 bp, Artificial Sequence
  Description of Artificial Sequence: Synthetic oligonucleotide
aagatgtataaagataacaccc

SEQ ID NO: 2777 - DNA, 22 bp, Artificial Sequence
  Description of Artificial Sequence: Synthetic oligonucleotide
ttcagcatccagagctggtcca

SEQ ID NO: 2778 - DNA, 22 bp, Artificial Sequence
  Description of Artificial Sequence: Synthetic oligonucleotide
attgatgtaccagttaaaccgt

SEQ ID NO: 2779 - DNA, 22 bp, Artificial Sequence
  Description of Artificial Sequence: Synthetic oligonucleotide
aagtctttccatgttcagtcca

SEQ ID NO: 2780 - DNA, 22 bp, Artificial Sequence
  Description of Artificial Sequence: Synthetic oligonucleotide
atatcataacttgtaagatggt

SEQ ID NO: 2781 - DNA, 22 bp, Artificial Sequence
  Description of Artificial Sequence: Synthetic oligonucleotide
tatctagaacagtctggttggc

SEQ ID NO: 2782 - DNA, 22 bp, Artificial Sequence
  Description of Artificial Sequence: Synthetic oligonucleotide
ttaacgtagactttcagctgca

SEQ ID NO: 2783 - DNA, 22 bp, Artificial Sequence
  Description of Artificial Sequence: Synthetic oligonucleotide
tttcagagaaatcagagtgggc

SEQ ID NO: 2784 - DNA, 22 bp, Artificial Sequence
  Description of Artificial Sequence: Synthetic oligonucleotide
atatgattggcagatacatgct

SEQ ID NO: 2785 - DNA, 22 bp, Artificial Sequence
  Description of Artificial Sequence: Synthetic oligonucleotide
atttcaactgagcgtgtcagct

SEQ ID NO: 2786 - DNA, 22 bp, Artificial Sequence
  Description of Artificial Sequence: Synthetic oligonucleotide
aatttgttggccatgaggacgc

SEQ ID NO: 2787 - DNA, 22 bp, Artificial Sequence
  Description of Artificial Sequence: Synthetic oligonucleotide
tttattatgtattcggagtcct

SEQ ID NO: 2788 - DNA, 22 bp, Artificial Sequence
  Description of Artificial Sequence: Synthetic oligonucleotide
atataaagctagaagctgacca

SEQ ID NO: 2789 - DNA, 22 bp, Artificial Sequence
  Description of Artificial Sequence: Synthetic oligonucleotide
attatggagcaaatataaagct

SEQ ID NO: 2790 - DNA, 22 bp, Artificial Sequence
  Description of Artificial Sequence: Synthetic oligonucleotide
ttctaatatgcctttcacagcc

SEQ ID NO: 2791 - DNA, 22 bp, Artificial Sequence
  Description of Artificial Sequence: Synthetic oligonucleotide
ttgttaaaggaaacatccaggg

SEQ ID NO: 2792 - DNA, 22 bp, Artificial Sequence
  Description of Artificial Sequence: Synthetic oligonucleotide
tttcttgggaaaggtcgaagcg

SEQ ID NO: 2793 - DNA, 22 bp, Artificial Sequence
  Description of Artificial Sequence: Synthetic oligonucleotide
taaacttctgtgttctaatcgt

SEQ ID NO: 2794 - DNA, 22 bp, Artificial Sequence
  Description of Artificial Sequence: Synthetic oligonucleotide
tttgagatacagattcttcggc

SEQ ID NO: 2795 - DNA, 22 bp, Artificial Sequence
  Description of Artificial Sequence: Synthetic oligonucleotide
ataatctcttccaaggtgagct

SEQ ID NO: 2796 - DNA, 22 bp, Artificial Sequence
  Description of Artificial Sequence: Synthetic oligonucleotide
atttcaaagaaaccagactcct

SEQ ID NO: 2797 - DNA, 22 bp, Artificial Sequence
  Description of Artificial Sequence: Synthetic oligonucleotide
taaaccattagctttctcacgt

SEQ ID NO: 2798 - DNA, 22 bp, Artificial Sequence
  Description of Artificial Sequence: Synthetic oligonucleotide
tttgccattcatgacaacaggg

SEQ ID NO: 2799 - DNA, 22 bp, Artificial Sequence
  Description of Artificial Sequence: Synthetic oligonucleotide
ttatctcatctaaatcctcggg

SEQ ID NO: 2800 - DNA, 22 bp, Artificial Sequence
  Description of Artificial Sequence: Synthetic oligonucleotide
atactgcaataagccctcaggg

SEQ ID NO: 2801 - DNA, 22 bp, Artificial Sequence
  Description of Artificial Sequence: Synthetic oligonucleotide
ttaatccgagggatcatttccg

SEQ ID NO: 2802 - DNA, 22 bp, Artificial Sequence
  Description of Artificial Sequence: Synthetic oligonucleotide
tttggtttacatatcatatgca

SEQ ID NO: 2803 - DNA, 22 bp, Artificial Sequence
  Description of Artificial Sequence: Synthetic oligonucleotide
atatgctgggagggtatgaggg

SEQ ID NO: 2804 - DNA, 22 bp, Artificial Sequence
  Description of Artificial Sequence: Synthetic oligonucleotide
atattctggcattgactgaggc

SEQ ID NO: 2805 - DNA, 22 bp, Artificial Sequence
  Description of Artificial Sequence: Synthetic oligonucleotide
taatgacttgcttcagtcccgc

SEQ ID NO: 2806 - DNA, 22 bp, Artificial Sequence
  Description of Artificial Sequence: Synthetic oligonucleotide
taaactattcctagctagagcc

SEQ ID NO: 2807 - DNA, 22 bp, Artificial Sequence
  Description of Artificial Sequence: Synthetic oligonucleotide
ttatgtactgacctaaatagtg

SEQ ID NO: 2808 - DNA, 22 bp, Artificial Sequence
  Description of Artificial Sequence: Synthetic oligonucleotide
ttcactgcccattcgaaatctc

SEQ ID NO: 2809 - DNA, 22 bp, Artificial Sequence
  Description of Artificial Sequence: Synthetic oligonucleotide
tataaatgtgaaatcacaccct

SEQ ID NO: 2810 - DNA, 22 bp, Artificial Sequence
  Description of Artificial Sequence: Synthetic oligonucleotide
tttgattgcaaatatgtgtgtg

SEQ ID NO: 2811 - DNA, 22 bp, Artificial Sequence
  Description of Artificial Sequence: Synthetic oligonucleotide
ttagtgcaagaccaaggatcct

SEQ ID NO: 2812 - DNA, 22 bp, Artificial Sequence
  Description of Artificial Sequence: Synthetic oligonucleotide
atcctgtacacatcatattggt

SEQ ID NO: 2813 - DNA, 22 bp, Artificial Sequence
  Description of Artificial Sequence: Synthetic oligonucleotide
ttagacttcaagtgggagacgc

SEQ ID NO: 2814 - DNA, 22 bp, Artificial Sequence
  Description of Artificial Sequence: Synthetic oligonucleotide
aataagttcattatcaagaggc

SEQ ID NO: 2815 - DNA, 22 bp, Artificial Sequence
  Description of Artificial Sequence: Synthetic oligonucleotide
tttgattagattatagagtcct

SEQ ID NO: 2816 - DNA, 22 bp, Artificial Sequence
  Description of Artificial Sequence: Synthetic oligonucleotide
tttgatacggagagaacttggt

SEQ ID NO: 2817 - DNA, 22 bp, Artificial Sequence
  Description of Artificial Sequence: Synthetic oligonucleotide
ttctactttaattgtattggct

SEQ ID NO: 2818 - DNA, 22 bp, Artificial Sequence
  Description of Artificial Sequence: Synthetic oligonucleotide
atactcaatcactttggtccca

SEQ ID NO: 2819 - DNA, 22 bp, Artificial Sequence
  Description of Artificial Sequence: Synthetic oligonucleotide
ttatcatctgacaggatttcgt

SEQ ID NO: 2820 - DNA, 22 bp, Artificial Sequence
  Description of Artificial Sequence: Synthetic oligonucleotide
tttcagaagcaggtcaagaggc

SEQ ID NO: 2821 - DNA, 22 bp, Artificial Sequence
  Description of Artificial Sequence: Synthetic oligonucleotide
atttcgaagaatcacagcagga

SEQ ID NO: 2822 - DNA, 22 bp, Artificial Sequence
  Description of Artificial Sequence: Synthetic oligonucleotide
attgtggtgcaaagctggagga

SEQ ID NO: 2823 - DNA, 22 bp, Artificial Sequence
  Description of Artificial Sequence: Synthetic oligonucleotide
tttgttcttccttggatgaggt

SEQ ID NO: 2824 - DNA, 22 bp, Artificial Sequence
  Description of Artificial Sequence: Synthetic oligonucleotide
aatgtactgaacattatttccc

SEQ ID NO: 2825 - DNA, 22 bp, Artificial Sequence
  Description of Artificial Sequence: Synthetic oligonucleotide
ttgtaatagggcatgagtccca

SEQ ID NO: 2826 - DNA, 22 bp, Artificial Sequence
  Description of Artificial Sequence: Synthetic oligonucleotide
aatagtctacactatcaaaccc

SEQ ID NO: 2827 - DNA, 22 bp, Artificial Sequence
  Description of Artificial Sequence: Synthetic oligonucleotide
ttcttcctttaatgcagaggct

SEQ ID NO: 2828 - DNA, 22 bp, Artificial Sequence
  Description of Artificial Sequence: Synthetic oligonucleotide
ataacctgggaagcgctgtgga

SEQ ID NO: 2829 - DNA, 22 bp, Artificial Sequence
  Description of Artificial Sequence: Synthetic oligonucleotide
ttatgtttagtccaactaagga

SEQ ID NO: 2830 - DNA, 22 bp, Artificial Sequence
  Description of Artificial Sequence: Synthetic oligonucleotide
tttgtctataatctttagggca

SEQ ID NO: 2831 - DNA, 22 bp, Artificial Sequence
  Description of Artificial Sequence: Synthetic oligonucleotide
aattccatcaccagaaagagct

SEQ ID NO: 2832 - DNA, 22 bp, Artificial Sequence
  Description of Artificial Sequence: Synthetic oligonucleotide
attaattccttggcagagtccg

SEQ ID NO: 2833 - DNA, 22 bp, Artificial Sequence
  Description of Artificial Sequence: Synthetic oligonucleotide
tttgaccttcatactctgtgga

SEQ ID NO: 2834 - DNA, 22 bp, Artificial Sequence
  Description of Artificial Sequence: Synthetic oligonucleotide
tatttcagtgcaagataatgcc

SEQ ID NO: 2835 - DNA, 22 bp, Artificial Sequence
  Description of Artificial Sequence: Synthetic oligonucleotide
ataacaattgacattagctcca

SEQ ID NO: 2836 - DNA, 22 bp, Artificial Sequence
  Description of Artificial Sequence: Synthetic oligonucleotide
ttatcttggagctcagggagca

SEQ ID NO: 2837 - DNA, 22 bp, Artificial Sequence
  Description of Artificial Sequence: Synthetic oligonucleotide
ttagtacacgagtaactctgcc

SEQ ID NO: 2838 - DNA, 22 bp, Artificial Sequence
  Description of Artificial Sequence: Synthetic oligonucleotide
ttaagtattgatttatcctcct

SEQ ID NO: 2839 - DNA, 22 bp, Artificial Sequence
  Description of Artificial Sequence: Synthetic oligonucleotide
ttacctttacacactgttcggc

SEQ ID NO: 2840 - DNA, 22 bp, Artificial Sequence
  Description of Artificial Sequence: Synthetic oligonucleotide
ttaagatttcatccacagaggg

SEQ ID NO: 2841 - DNA, 22 bp, Artificial Sequence
  Description of Artificial Sequence: Synthetic oligonucleotide
ttgtaacagagaagcgtgccca

SEQ ID NO: 2842 - DNA, 22 bp, Artificial Sequence
  Description of Artificial Sequence: Synthetic oligonucleotide
taacactagccgttcctttggc

SEQ ID NO: 2843 - DNA, 22 bp, Artificial Sequence
  Description of Artificial Sequence: Synthetic oligonucleotide
tatttgctggagttccaggccc

SEQ ID NO: 2844 - DNA, 22 bp, Artificial Sequence
  Description of Artificial Sequence: Synthetic oligonucleotide
tttcatctgcaaggacagtgct

SEQ ID NO: 2845 - DNA, 22 bp, Artificial Sequence
  Description of Artificial Sequence: Synthetic oligonucleotide
ttattgaacatcctctggaggc

SEQ ID NO: 2846 - DNA, 22 bp, Artificial Sequence
  Description of Artificial Sequence: Synthetic oligonucleotide
atatatatgtgtatactgattg

SEQ ID NO: 2847 - DNA, 22 bp, Artificial Sequence
  Description of Artificial Sequence: Synthetic oligonucleotide
tttcggatactcagaagctcca

SEQ ID NO: 2848 - DNA, 22 bp, Artificial Sequence
  Description of Artificial Sequence: Synthetic oligonucleotide
atatctgatccttgatagaggt

SEQ ID NO: 2849 - DNA, 22 bp, Artificial Sequence
  Description of Artificial Sequence: Synthetic oligonucleotide
ttgtttggaaaggttgcctcca

SEQ ID NO: 2850 - DNA, 22 bp, Artificial Sequence
  Description of Artificial Sequence: Synthetic oligonucleotide
ttgttcttcttcctcatgggcg

SEQ ID NO: 2851 - DNA, 22 bp, Artificial Sequence
  Description of Artificial Sequence: Synthetic oligonucleotide
ttcataatgggtcttgtccgcc

SEQ ID NO: 2852 - DNA, 22 bp, Artificial Sequence
  Description of Artificial Sequence: Synthetic oligonucleotide
tttctgtgaaatgctgtcagcc

SEQ ID NO: 2853 - DNA, 22 bp, Artificial Sequence
  Description of Artificial Sequence: Synthetic oligonucleotide
taaagttaacgtgttggaggcc

SEQ ID NO: 2854 - DNA, 22 bp, Artificial Sequence
  Description of Artificial Sequence: Synthetic oligonucleotide
ataaagttgcacatcacatcgc

SEQ ID NO: 2855 - DNA, 22 bp, Artificial Sequence
  Description of Artificial Sequence: Synthetic oligonucleotide
atagtctctgtgtgccagtcgg

SEQ ID NO: 2856 - DNA, 22 bp, Artificial Sequence
  Description of Artificial Sequence: Synthetic oligonucleotide
tatctgtgagaacagaaagcgt

SEQ ID NO: 2857 - DNA, 22 bp, Artificial Sequence
  Description of Artificial Sequence: Synthetic oligonucleotide
tatataatgagccctgtaccgc

SEQ ID NO: 2858 - DNA, 22 bp, Artificial Sequence
  Description of Artificial Sequence: Synthetic oligonucleotide
ttggacatagctggagcttggt

SEQ ID NO: 2859 - DNA, 22 bp, Artificial Sequence
  Description of Artificial Sequence: Synthetic oligonucleotide
tttcacaatgacataggcagct

SEQ ID NO: 2860 - DNA, 22 bp, Artificial Sequence
  Description of Artificial Sequence: Synthetic oligonucleotide
aattgtttaactagtaccagct

SEQ ID NO: 2861 - DNA, 22 bp, Artificial Sequence
  Description of Artificial Sequence: Synthetic oligonucleotide
aatcttgttaagtaaatacggg

SEQ ID NO: 2862 - DNA, 22 bp, Artificial Sequence
  Description of Artificial Sequence: Synthetic oligonucleotide
tttctggataactcagagtggc

SEQ ID NO: 2863 - DNA, 22 bp, Artificial Sequence
  Description of Artificial Sequence: Synthetic oligonucleotide
ttgtctgtacagttcataaggc

SEQ ID NO: 2864 - DNA, 22 bp, Artificial Sequence
  Description of Artificial Sequence: Synthetic oligonucleotide
tttacataggatatgcattggg

SEQ ID NO: 2865 - DNA, 22 bp, Artificial Sequence
  Description of Artificial Sequence: Synthetic oligonucleotide
attagtgggaccacaggcacat

SEQ ID NO: 2866 - DNA, 22 bp, Artificial Sequence
  Description of Artificial Sequence: Synthetic oligonucleotide
aattgtgatgtggagtttccac

SEQ ID NO: 2867 - DNA, 22 bp, Artificial Sequence
  Description of Artificial Sequence: Synthetic oligonucleotide
ttctctggctagttagaaggca

SEQ ID NO: 2868 - DNA, 22 bp, Artificial Sequence
  Description of Artificial Sequence: Synthetic oligonucleotide
ttaattcacctgtttattagca

SEQ ID NO: 2869 - DNA, 22 bp, Artificial Sequence
  Description of Artificial Sequence: Synthetic oligonucleotide
atatatggccagagtagctggt

SEQ ID NO: 2870 - DNA, 22 bp, Artificial Sequence
  Description of Artificial Sequence: Synthetic oligonucleotide
ttaatgacctggtcattcagcc

SEQ ID NO: 2871 - DNA, 22 bp, Artificial Sequence
  Description of Artificial Sequence: Synthetic oligonucleotide
ttaaaggaaagctttaaatgcc

SEQ ID NO: 2872 - DNA, 22 bp, Artificial Sequence
  Description of Artificial Sequence: Synthetic oligonucleotide
taagcgtttctttaacagaccg

SEQ ID NO: 2873 - DNA, 22 bp, Artificial Sequence
  Description of Artificial Sequence: Synthetic oligonucleotide
tttctttaacagcttctcccag

SEQ ID NO: 2874 - DNA, 22 bp, Artificial Sequence
  Description of Artificial Sequence: Synthetic oligonucleotide
ttgtagatgaaggtgagcagca

SEQ ID NO: 2875 - DNA, 22 bp, Artificial Sequence
  Description of Artificial Sequence: Synthetic oligonucleotide
atatacatgggccctacacgct

SEQ ID NO: 2876 - DNA, 22 bp, Artificial Sequence
  Description of Artificial Sequence: Synthetic oligonucleotide
ataaccagccatcttaatgccc

SEQ ID NO: 2877 - DNA, 22 bp, Artificial Sequence
  Description of Artificial Sequence: Synthetic oligonucleotide
atcttctttcaaatcaacgcga

SEQ ID NO: 2878 - DNA, 22 bp, Artificial Sequence
  Description of Artificial Sequence: Synthetic oligonucleotide
tttagtcagcacaatcattcgg

SEQ ID NO: 2879 - DNA, 22 bp, Artificial Sequence
  Description of Artificial Sequence: Synthetic oligonucleotide
ttaccagttcatctaatatgcg

SEQ ID NO: 2880 - DNA, 22 bp, Artificial Sequence
  Description of Artificial Sequence: Synthetic oligonucleotide
taatcttaaggaacagagcgcg

SEQ ID NO: 2881 - DNA, 22 bp, Artificial Sequence
  Description of Artificial Sequence: Synthetic oligonucleotide
taagtacttcctgggcatagcc

SEQ ID NO: 2882 - DNA, 22 bp, Artificial Sequence
  Description of Artificial Sequence: Synthetic oligonucleotide
aatggaacacaagatgtatggg

SEQ ID NO: 2883 - DNA, 22 bp, Artificial Sequence
  Description of Artificial Sequence: Synthetic oligonucleotide
atatgttcaaaggtgatgtcgg

SEQ ID NO: 2884 - DNA, 22 bp, Artificial Sequence
  Description of Artificial Sequence: Synthetic oligonucleotide
ttatccttccactgtgtggcgt

SEQ ID NO: 2885 - DNA, 22 bp, Artificial Sequence
  Description of Artificial Sequence: Synthetic oligonucleotide
atagttccagacactgtatcct

SEQ ID NO: 2886 - DNA, 22 bp, Artificial Sequence
  Description of Artificial Sequence: Synthetic oligonucleotide
tttgtgaaagaaagggaaggct

SEQ ID NO: 2887 - DNA, 22 bp, Artificial Sequence
  Description of Artificial Sequence: Synthetic oligonucleotide
ttaatcttcccttaaaggacca

SEQ ID NO: 2888 - DNA, 22 bp, Artificial Sequence
  Description of Artificial Sequence: Synthetic oligonucleotide
taaacaatcactttaatcagct

SEQ ID NO: 2889 - DNA, 22 bp, Artificial Sequence
  Description of Artificial Sequence: Synthetic oligonucleotide
tttatatagcacttcataagca

SEQ ID NO: 2890 - DNA, 22 bp, Artificial Sequence
  Description of Artificial Sequence: Synthetic oligonucleotide
taaggagacccaatgaactgca

SEQ ID NO: 2891 - DNA, 22 bp, Artificial Sequence
  Description of Artificial Sequence: Synthetic oligonucleotide
ataataaatgggcatccgacct

SEQ ID NO: 2892 - DNA, 22 bp, Artificial Sequence
  Description of Artificial Sequence: Synthetic oligonucleotide
atttgccatagacaagatgcca

SEQ ID NO: 2893 - DNA, 22 bp, Artificial Sequence
  Description of Artificial Sequence: Synthetic oligonucleotide
atataagtagcagttctctgct

SEQ ID NO: 2894 - DNA, 22 bp, Artificial Sequence
  Description of Artificial Sequence: Synthetic oligonucleotide
ttatgtgcccttagccgctggc

SEQ ID NO: 2895 - DNA, 22 bp, Artificial Sequence
  Description of Artificial Sequence: Synthetic oligonucleotide
ttgattctttagtattcgtgct

SEQ ID NO: 2896 - DNA, 22 bp, Artificial Sequence
  Description of Artificial Sequence: Synthetic oligonucleotide
ttatttcaccatgtttaaaggt

SEQ ID NO: 2897 - DNA, 22 bp, Artificial Sequence
  Description of Artificial Sequence: Synthetic oligonucleotide
tagaatcaatactaaggctggt

SEQ ID NO: 2898 - DNA, 22 bp, Artificial Sequence
  Description of Artificial Sequence: Synthetic oligonucleotide
atatgtcttgaattggaagccg

SEQ ID NO: 2899 - DNA, 22 bp, Artificial Sequence
  Description of Artificial Sequence: Synthetic oligonucleotide
ttagtgatggatatggtctgct

SEQ ID NO: 2900 - DNA, 22 bp, Artificial Sequence
  Description of Artificial Sequence: Synthetic oligonucleotide
ttatcagtcctcttcaatgccc

SEQ ID NO: 2901 - DNA, 22 bp, Artificial Sequence
  Description of Artificial Sequence: Synthetic oligonucleotide
tttcaccatgcatttcagtgct

SEQ ID NO: 2902 - DNA, 22 bp, Artificial Sequence
  Description of Artificial Sequence: Synthetic oligonucleotide
aatacttcatagacaactgggc

SEQ ID NO: 2903 - DNA, 22 bp, Artificial Sequence
  Description of Artificial Sequence: Synthetic oligonucleotide
tttctccatgagtaactgagcc

SEQ ID NO: 2904 - DNA, 22 bp, Artificial Sequence
  Description of Artificial Sequence: Synthetic oligonucleotide
ttatcctggatgatatgcaccc

SEQ ID NO: 2905 - DNA, 22 bp, Artificial Sequence
  Description of Artificial Sequence: Synthetic oligonucleotide
ttatggattccctagatttggg

SEQ ID NO: 2906 - DNA, 22 bp, Artificial Sequence
  Description of Artificial Sequence: Synthetic oligonucleotide
ttactcaaagaaattgccgggc

SEQ ID NO: 2907 - DNA, 22 bp, Artificial Sequence
  Description of Artificial Sequence: Synthetic oligonucleotide
ttatccgatccagctttggcct

SEQ ID NO: 2908 - DNA, 22 bp, Artificial Sequence
  Description of Artificial Sequence: Synthetic oligonucleotide
tttactatagactttggcagca

SEQ ID NO: 2909 - DNA, 22 bp, Artificial Sequence
  Description of Artificial Sequence: Synthetic oligonucleotide
tataaggcccggacattctgcc

SEQ ID NO: 2910 - DNA, 22 bp, Artificial Sequence
  Description of Artificial Sequence: Synthetic oligonucleotide
ttaagaaatacccataaggcgt

SEQ ID NO: 2911 - DNA, 22 bp, Artificial Sequence
  Description of Artificial Sequence: Synthetic oligonucleotide
ataagattgcaaatgaggtccc

SEQ ID NO: 2912 - DNA, 22 bp, Artificial Sequence
  Description of Artificial Sequence: Synthetic oligonucleotide
taatataacctgtttgtaggca

SEQ ID NO: 2913 - DNA, 22 bp, Artificial Sequence
  Description of Artificial Sequence: Synthetic oligonucleotide
tagagaaacaagaaactgaccc

SEQ ID NO: 2914 - DNA, 22 bp, Artificial Sequence
  Description of Artificial Sequence: Synthetic oligonucleotide
tataccaatcaggcactgtggc

SEQ ID NO: 2915 - DNA, 22 bp, Artificial Sequence
  Description of Artificial Sequence: Synthetic oligonucleotide
ttgtataagtaggtggagaccc

SEQ ID NO: 2916 - DNA, 22 bp, Artificial Sequence
  Description of Artificial Sequence: Synthetic oligonucleotide
ttctcattaggtctcaccacgg

SEQ ID NO: 2917 - DNA, 22 bp, Artificial Sequence
  Description of Artificial Sequence: Synthetic oligonucleotide
tttacttatctttctctgggct

SEQ ID NO: 2918 - DNA, 22 bp, Artificial Sequence
  Description of Artificial Sequence: Synthetic oligonucleotide
tttattatggtgatgagatcga

SEQ ID NO: 2919 - DNA, 22 bp, Artificial Sequence
  Description of Artificial Sequence: Synthetic oligonucleotide
atatatgccaagccaatatcca

SEQ ID NO: 2920 - DNA, 22 bp, Artificial Sequence
  Description of Artificial Sequence: Synthetic oligonucleotide
tttatctaaactcaaccacgca

SEQ ID NO: 2921 - DNA, 22 bp, Artificial Sequence
  Description of Artificial Sequence: Synthetic oligonucleotide
ttccgttccgagaaaggcaggg

SEQ ID NO: 2922 - DNA, 22 bp, Artificial Sequence
  Description of Artificial Sequence: Synthetic oligonucleotide
ttaagtaacctttgcaaatgga

SEQ ID NO: 2923 - DNA, 22 bp, Artificial Sequence
  Description of Artificial Sequence: Synthetic oligonucleotide
attacaccattgatagctgcca

SEQ ID NO: 2924 - DNA, 22 bp, Artificial Sequence
  Description of Artificial Sequence: Synthetic oligonucleotide
taagtccatgatcatgagggca

SEQ ID NO: 2925 - DNA, 22 bp, Artificial Sequence
  Description of Artificial Sequence: Synthetic oligonucleotide
atagaggatcacgccagcagcc

SEQ ID NO: 2926 - DNA, 22 bp, Artificial Sequence
  Description of Artificial Sequence: Synthetic oligonucleotide
taagcacagaaaggagagggcg

SEQ ID NO: 2927 - DNA, 22 bp, Artificial Sequence
  Description of Artificial Sequence: Synthetic oligonucleotide
atgtagttagcaggactgagcc

SEQ ID NO: 2928 - DNA, 22 bp, Artificial Sequence
  Description of Artificial Sequence: Synthetic oligonucleotide
ttatatctcgcttaatcttcct

SEQ ID NO: 2929 - DNA, 22 bp, Artificial Sequence
  Description of Artificial Sequence: Synthetic oligonucleotide
tatcttagaaccaatagttcca

SEQ ID NO: 2930 - DNA, 22 bp, Artificial Sequence
  Description of Artificial Sequence: Synthetic oligonucleotide
ttgttagaaagagaagcttcct

SEQ ID NO: 2931 - DNA, 22 bp, Artificial Sequence
  Description of Artificial Sequence: Synthetic oligonucleotide
aatggtattgggattacatgca

SEQ ID NO: 2932 - DNA, 22 bp, Artificial Sequence
  Description of Artificial Sequence: Synthetic oligonucleotide
taaatggaaattgtccgtgcct

SEQ ID NO: 2933 - DNA, 22 bp, Artificial Sequence
  Description of Artificial Sequence: Synthetic oligonucleotide
tttcattatgtagtctgcagct

SEQ ID NO: 2934 - DNA, 22 bp, Artificial Sequence
  Description of Artificial Sequence: Synthetic oligonucleotide
aatccttcttgcagtcacagca

SEQ ID NO: 2935 - DNA, 22 bp, Artificial Sequence
  Description of Artificial Sequence: Synthetic oligonucleotide
ttgtggttaatgggaatttgcc

SEQ ID NO: 2936 - DNA, 22 bp, Artificial Sequence
  Description of Artificial Sequence: Synthetic oligonucleotide
atctctctccgtgctcagagct

SEQ ID NO: 2937 - DNA, 22 bp, Artificial Sequence
  Description of Artificial Sequence: Synthetic oligonucleotide
ttcaaccagaggtaaggatgcc

SEQ ID NO: 2938 - DNA, 22 bp, Artificial Sequence
  Description of Artificial Sequence: Synthetic oligonucleotide
aattcacataatccttccagca

SEQ ID NO: 2939 - DNA, 22 bp, Artificial Sequence
  Description of Artificial Sequence: Synthetic oligonucleotide
ttcttcttcatggtgaaatgcg

SEQ ID NO: 2940 - DNA, 22 bp, Artificial Sequence
  Description of Artificial Sequence: Synthetic oligonucleotide
taacgatatgatatttaaagcg

SEQ ID NO: 2941 - DNA, 22 bp, Artificial Sequence
  Description of Artificial Sequence: Synthetic oligonucleotide
ataaacttgaagtaagagaggt

SEQ ID NO: 2942 - DNA, 22 bp, Artificial Sequence
  Description of Artificial Sequence: Synthetic oligonucleotide
atgatgggttgattcacgggca

SEQ ID NO: 2943 - DNA, 22 bp, Artificial Sequence
  Description of Artificial Sequence: Synthetic oligonucleotide
ttatgatgggttgattcacggg

SEQ ID NO: 2944 - DNA, 22 bp, Artificial Sequence
  Description of Artificial Sequence: Synthetic oligonucleotide
taatactataatcaaacatgca

SEQ ID NO: 2945 - DNA, 22 bp, Artificial Sequence
  Description of Artificial Sequence: Synthetic oligonucleotide
ttctatcaagagcaagtctgca

SEQ ID NO: 2946 - DNA, 22 bp, Artificial Sequence
  Description of Artificial Sequence: Synthetic oligonucleotide
atttgcttctgctttaaaggct

SEQ ID NO: 2947 - DNA, 22 bp, Artificial Sequence
  Description of Artificial Sequence: Synthetic oligonucleotide
aacaacaacaatctgaggtgcc

SEQ ID NO: 2948 - DNA, 22 bp, Artificial Sequence
  Description of Artificial Sequence: Synthetic oligonucleotide
ttctgttatgaaactctcaggg

SEQ ID NO: 2949 - DNA, 22 bp, Artificial Sequence
  Description of Artificial Sequence: Synthetic oligonucleotide
tttgatcaagagtcaccacggc

SEQ ID NO: 2950 - DNA, 22 bp, Artificial Sequence
  Description of Artificial Sequence: Synthetic oligonucleotide
tttaggagcaccaaataatggt

SEQ ID NO: 2951 - DNA, 22 bp, Artificial Sequence
  Description of Artificial Sequence: Synthetic oligonucleotide
tattcttcacagcttcgttgct

SEQ ID NO: 2952 - DNA, 22 bp, Artificial Sequence
  Description of Artificial Sequence: Synthetic oligonucleotide
aatgtgtttcttgtaaggaggc

SEQ ID NO: 2953 - DNA, 22 bp, Artificial Sequence
  Description of Artificial Sequence: Synthetic oligonucleotide
tttgggtatcctttagactgca

SEQ ID NO: 2954 - DNA, 22 bp, Artificial Sequence
  Description of Artificial Sequence: Synthetic oligonucleotide
ttaacagtgaacatttcacctt

SEQ ID NO: 2955 - DNA, 22 bp, Artificial Sequence
  Description of Artificial Sequence: Synthetic oligonucleotide
ttcatgaaggtatctaagcgca

SEQ ID NO: 2956 - DNA, 22 bp, Artificial Sequence
  Description of Artificial Sequence: Synthetic oligonucleotide
tttcatgaaggtatctaagcgc

SEQ ID NO: 2957 - DNA, 22 bp, Artificial Sequence
  Description of Artificial Sequence: Synthetic oligonucleotide
attaacctctgttctccttgct

SEQ ID NO: 2958 - DNA, 22 bp, Artificial Sequence
  Description of Artificial Sequence: Synthetic oligonucleotide
tttgcctataagtttcttgcca

SEQ ID NO: 2959 - DNA, 22 bp, Artificial Sequence
  Description of Artificial Sequence: Synthetic oligonucleotide
atttctaagatgtttcctgcct

SEQ ID NO: 2960 - DNA, 22 bp, Artificial Sequence
  Description of Artificial Sequence: Synthetic oligonucleotide
tacccttgaaataatataccca

SEQ ID NO: 2961 - DNA, 22 bp, Artificial Sequence
  Description of Artificial Sequence: Synthetic oligonucleotide
ttgtgcttataagtggtaacct

SEQ ID NO: 2962 - DNA, 22 bp, Artificial Sequence
  Description of Artificial Sequence: Synthetic oligonucleotide
taatgctttaatttactgtggc

SEQ ID NO: 2963 - DNA, 22 bp, Artificial Sequence
  Description of Artificial Sequence: Synthetic oligonucleotide
ctgcccattcgaaatctcaggc

SEQ ID NO: 2964 - DNA, 22 bp, Artificial Sequence
  Description of Artificial Sequence: Synthetic oligonucleotide
aatcccattgagaatatctccc

SEQ ID NO: 2965 - DNA, 22 bp, Artificial Sequence
  Description of Artificial Sequence: Synthetic oligonucleotide
attatatttgcacaaatgtggt

SEQ ID NO: 2966 - DNA, 22 bp, Artificial Sequence
  Description of Artificial Sequence: Synthetic oligonucleotide
tatatcagtgatgataccagga

SEQ ID NO: 2967 - DNA, 22 bp, Artificial Sequence
  Description of Artificial Sequence: Synthetic oligonucleotide
ttattctgggcattattatcgt

SEQ ID NO: 2968 - DNA, 22 bp, Artificial Sequence
  Description of Artificial Sequence: Synthetic oligonucleotide
atatgatgcggtttctctcggg

SEQ ID NO: 2969 - DNA, 22 bp, Artificial Sequence
  Description of Artificial Sequence: Synthetic oligonucleotide
tatatgatgcggtttctctcgg

SEQ ID NO: 2970 - DNA, 22 bp, Artificial Sequence
  Description of Artificial Sequence: Synthetic oligonucleotide
tagaagagttacagaatgagga

SEQ ID NO: 2971 - DNA, 22 bp, Artificial Sequence
  Description of Artificial Sequence: Synthetic oligonucleotide
taagtctactaacaatattcgt

SEQ ID NO: 2972 - DNA, 22 bp, Artificial Sequence
  Description of Artificial Sequence: Synthetic oligonucleotide
attgcaaatatgtgtgtgtctt

SEQ ID NO: 2973 - DNA, 22 bp, Artificial Sequence
  Description of Artificial Sequence: Synthetic oligonucleotide
ttcttcttgtctagtttgtcct

SEQ ID NO: 2974 - DNA, 22 bp, Artificial Sequence
  Description of Artificial Sequence: Synthetic oligonucleotide
aagagtagatacattgtaccca

SEQ ID NO: 2975 - DNA, 22 bp, Artificial Sequence
  Description of Artificial Sequence: Synthetic oligonucleotide
ttatgataaatcagcatgtggt

SEQ ID NO: 2976 - DNA, 22 bp, Artificial Sequence
  Description of Artificial Sequence: Synthetic oligonucleotide
aacatacttcacatttaaaggg

SEQ ID NO: 2977 - DNA, 22 bp, Artificial Sequence
  Description of Artificial Sequence: Synthetic oligonucleotide
ataaggaagtagcggtccacgg

SEQ ID NO: 2978 - DNA, 22 bp, Artificial Sequence
  Description of Artificial Sequence: Synthetic oligonucleotide
tttagccataaggaagtagcgg

SEQ ID NO: 2979 - DNA, 22 bp, Artificial Sequence
  Description of Artificial Sequence: Synthetic oligonucleotide
ttcttgatgctttaaccgagca

SEQ ID NO: 2980 - DNA, 22 bp, Artificial Sequence
  Description of Artificial Sequence: Synthetic oligonucleotide
tttccagtgtcgttaaactggc

SEQ ID NO: 2981 - DNA, 22 bp, Artificial Sequence
  Description of Artificial Sequence: Synthetic oligonucleotide
ttaaatgttgcattacagtgct

SEQ ID NO: 2982 - DNA, 22 bp, Artificial Sequence
  Description of Artificial Sequence: Synthetic oligonucleotide
attctgtaacatcgtcttggct

SEQ ID NO: 2983 - DNA, 22 bp, Artificial Sequence
  Description of Artificial Sequence: Synthetic oligonucleotide
attccggtagagcttcagcggg

SEQ ID NO: 2984 - DNA, 22 bp, Artificial Sequence
  Description of Artificial Sequence: Synthetic oligonucleotide
tatcgtcctggtagagggtggg

SEQ ID NO: 2985 - DNA, 22 bp, Artificial Sequence
  Description of Artificial Sequence: Synthetic oligonucleotide
ataaatagaaccaggagaccca

SEQ ID NO: 2986 - DNA, 22 bp, Artificial Sequence
  Description of Artificial Sequence: Synthetic oligonucleotide
tataaatagaaccaggagaccc

SEQ ID NO: 2987 - DNA, 22 bp, Artificial Sequence
  Description of Artificial Sequence: Synthetic oligonucleotide
taaacaggtaaaggacgctggc

SEQ ID NO: 2988 - DNA, 22 bp, Artificial Sequence
  Description of Artificial Sequence: Synthetic oligonucleotide
tttctgatagctaggaggtcct

SEQ ID NO: 2989 - DNA, 22 bp, Artificial Sequence
  Description of Artificial Sequence: Synthetic oligonucleotide
tttcctcaggcgtagggatcgc

SEQ ID NO: 2990 - DNA, 22 bp, Artificial Sequence
  Description of Artificial Sequence: Synthetic oligonucleotide
ttcttcaatggtctcagtgcgg

SEQ ID NO: 2991 - DNA, 22 bp, Artificial Sequence
  Description of Artificial Sequence: Synthetic oligonucleotide
ttctcattccgccggttgtgga

SEQ ID NO: 2992 - DNA, 22 bp, Artificial Sequence
  Description of Artificial Sequence: Synthetic oligonucleotide
atatccatgggcagagagagcc

SEQ ID NO: 2993 - DNA, 22 bp, Artificial Sequence
  Description of Artificial Sequence: Synthetic oligonucleotide
tactgcttcaggtcactgtcca

SEQ ID NO: 2994 - DNA, 22 bp, Artificial Sequence
  Description of Artificial Sequence: Synthetic oligonucleotide
ttaagtccacagtttagcactc

SEQ ID NO: 2995 - DNA, 22 bp, Artificial Sequence
  Description of Artificial Sequence: Synthetic oligonucleotide
tacacacctacctttaagtcca

SEQ ID NO: 2996 - DNA, 22 bp, Artificial Sequence
  Description of Artificial Sequence: Synthetic oligonucleotide
ttacacattggacatgttcggt

SEQ ID NO: 2997 - DNA, 22 bp, Artificial Sequence
  Description of Artificial Sequence: Synthetic oligonucleotide
atcacttccgtcatcatctggt

SEQ ID NO: 2998 - DNA, 22 bp, Artificial Sequence
  Description of Artificial Sequence: Synthetic oligonucleotide
atcaaatcagaatctaataggt

SEQ ID NO: 2999 - DNA, 22 bp, Artificial Sequence
  Description of Artificial Sequence: Synthetic oligonucleotide
atcattcctaagaatcaaaccc

SEQ ID NO: 3000 - DNA, 22 bp, Artificial Sequence
  Description of Artificial Sequence: Synthetic oligonucleotide
aactggcatctgtttaaaggcc

SEQ ID NO: 3001 - DNA, 22 bp, Artificial Sequence
  Description of Artificial Sequence: Synthetic oligonucleotide
tttggattcaagcttgccagga

SEQ ID NO: 3002 - DNA, 22 bp, Artificial Sequence
  Description of Artificial Sequence: Synthetic oligonucleotide
atattgtatgagtctttgtcca

SEQ ID NO: 3003 - DNA, 22 bp, Artificial Sequence
  Description of Artificial Sequence: Synthetic oligonucleotide
attacatcagctttgttatcct

SEQ ID NO: 3004 - DNA, 22 bp, Artificial Sequence
  Description of Artificial Sequence: Synthetic oligonucleotide
tttctgtgcgggaaggctgcgt

SEQ ID NO: 3005 - DNA, 22 bp, Artificial Sequence
  Description of Artificial Sequence: Synthetic oligonucleotide
ataagttcacatgtcctttcca

SEQ ID NO: 3006 - DNA, 22 bp, Artificial Sequence
  Description of Artificial Sequence: Synthetic oligonucleotide
tttcagtagatatcgaactgct

SEQ ID NO: 3007 - DNA, 22 bp, Artificial Sequence
  Description of Artificial Sequence: Synthetic oligonucleotide
attaactgaaatgaaatcacca

SEQ ID NO: 3008 - DNA, 22 bp, Artificial Sequence
  Description of Artificial Sequence: Synthetic oligonucleotide
ttaaagatgtatcctatatcct

SEQ ID NO: 3009 - DNA, 22 bp, Artificial Sequence
  Description of Artificial Sequence: Synthetic oligonucleotide
atatgttctaattctgggtgct

SEQ ID NO: 3010 - DNA, 22 bp, Artificial Sequence
  Description of Artificial Sequence: Synthetic oligonucleotide
tttgtatatcttcgaaatgggc

SEQ ID NO: 3011 - DNA, 22 bp, Artificial Sequence
  Description of Artificial Sequence: Synthetic oligonucleotide
ttcaatgacttattaaaggcct

SEQ ID NO: 3012 - DNA, 22 bp, Artificial Sequence
  Description of Artificial Sequence: Synthetic oligonucleotide
aatactaatcagtttaactgct

SEQ ID NO: 3013 - DNA, 22 bp, Artificial Sequence
  Description of Artificial Sequence: Synthetic oligonucleotide
ttacagcaataaatagcaaggt

SEQ ID NO: 3014 - DNA, 22 bp, Artificial Sequence
  Description of Artificial Sequence: Synthetic oligonucleotide
taatgacaaatcatctgatgcc

SEQ ID NO: 3015 - DNA, 22 bp, Artificial Sequence
  Description of Artificial Sequence: Synthetic oligonucleotide
tttctagtacccactctcaggg

SEQ ID NO: 3016 - DNA, 22 bp, Artificial Sequence
  Description of Artificial Sequence: Synthetic oligonucleotide
ttaatgagtaagcaattgtccc

SEQ ID NO: 3017 - DNA, 22 bp, Artificial Sequence
  Description of Artificial Sequence: Synthetic oligonucleotide
ttagtgaatagtgtcaagtggg

SEQ ID NO: 3018 - DNA, 22 bp, Artificial Sequence
  Description of Artificial Sequence: Synthetic oligonucleotide
tttcatcaatatttcaacagct

SEQ ID NO: 3019 - DNA, 22 bp, Artificial Sequence
  Description of Artificial Sequence: Synthetic oligonucleotide
atttgatcctattcaattggca

SEQ ID NO: 3020 - DNA, 22 bp, Artificial Sequence
  Description of Artificial Sequence: Synthetic oligonucleotide
ttggactggtacagggtgaggt

SEQ ID NO: 3021 - DNA, 22 bp, Artificial Sequence
  Description of Artificial Sequence: Synthetic oligonucleotide
ttatgccacaaggcccggaggc

SEQ ID NO: 3022 - DNA, 22 bp, Artificial Sequence
  Description of Artificial Sequence: Synthetic oligonucleotide
aatcaccatccttgagcgtcgg

SEQ ID NO: 3023 - DNA, 22 bp, Artificial Sequence
  Description of Artificial Sequence: Synthetic oligonucleotide
ttcggtcaagatgaaatcacca

SEQ ID NO: 3024 - DNA, 22 bp, Artificial Sequence
  Description of Artificial Sequence: Synthetic oligonucleotide
tttcttcaacccatcttgggcc

SEQ ID NO: 3025 - DNA, 22 bp, Artificial Sequence
  Description of Artificial Sequence: Synthetic oligonucleotide
ttaagcgtgaaagctgtcagct

SEQ ID NO: 3026 - DNA, 22 bp, Artificial Sequence
  Description of Artificial Sequence: Synthetic oligonucleotide
atgatgaccacatcaaacaggc

SEQ ID NO: 3027 - DNA, 22 bp, Artificial Sequence
  Description of Artificial Sequence: Synthetic oligonucleotide
tttatactccaggatgcaggca

SEQ ID NO: 3028 - DNA, 22 bp, Artificial Sequence
  Description of Artificial Sequence: Synthetic oligonucleotide
tttgaagatccggaatactcgg

SEQ ID NO: 3029 - DNA, 22 bp, Artificial Sequence
  Description of Artificial Sequence: Synthetic oligonucleotide
tttcggaaacacataatttggg

SEQ ID NO: 3030 - DNA, 22 bp, Artificial Sequence
  Description of Artificial Sequence: Synthetic oligonucleotide
ttaactgagaagaggagttcga

SEQ ID NO: 3031 - DNA, 22 bp, Artificial Sequence
  Description of Artificial Sequence: Synthetic oligonucleotide
ttagaaatgacagttctctcct

SEQ ID NO: 3032 - DNA, 22 bp, Artificial Sequence
  Description of Artificial Sequence: Synthetic oligonucleotide
tttgactgtgaaatcttcggct

SEQ ID NO: 3033 - DNA, 22 bp, Artificial Sequence
  Description of Artificial Sequence: Synthetic oligonucleotide
tttcattgttatagggtgtgcc

SEQ ID NO: 3034 - DNA, 22 bp, Artificial Sequence
  Description of Artificial Sequence: Synthetic oligonucleotide
attattcaggcaattgctacca

SEQ ID NO: 3035 - DNA, 22 bp, Artificial Sequence
  Description of Artificial Sequence: Synthetic oligonucleotide
tttctcaaatgccctaatccgt

SEQ ID NO: 3036 - DNA, 22 bp, Artificial Sequence
  Description of Artificial Sequence: Synthetic oligonucleotide
atatgcatttctcaaatgccct

SEQ ID NO: 3037 - DNA, 22 bp, Artificial Sequence
  Description of Artificial Sequence: Synthetic oligonucleotide
tatgactctcttattctcaccg

SEQ ID NO: 3038 - DNA, 22 bp, Artificial Sequence
  Description of Artificial Sequence: Synthetic oligonucleotide
attgtcttgctgaaggcaaggg

SEQ ID NO: 3039 - DNA, 22 bp, Artificial Sequence
  Description of Artificial Sequence: Synthetic oligonucleotide
taaggcaaagttcttctgggca

SEQ ID NO: 3040 - DNA, 22 bp, Artificial Sequence
  Description of Artificial Sequence: Synthetic oligonucleotide
atacacaatgcgcccgttggcc

SEQ ID NO: 3041 - DNA, 22 bp, Artificial Sequence
  Description of Artificial Sequence: Synthetic oligonucleotide
taatctgtccaaagtctggccg

SEQ ID NO: 3042 - DNA, 22 bp, Artificial Sequence
  Description of Artificial Sequence: Synthetic oligonucleotide
taccttatacacaaacatacgc

SEQ ID NO: 3043 - DNA, 22 bp, Artificial Sequence
  Description of Artificial Sequence: Synthetic oligonucleotide
aatgatgattctttcatccgct

SEQ ID NO: 3044 - DNA, 22 bp, Artificial Sequence
  Description of Artificial Sequence: Synthetic oligonucleotide
atacagaggaactcttcttggc

SEQ ID NO: 3045 - DNA, 22 bp, Artificial Sequence
  Description of Artificial Sequence: Synthetic oligonucleotide
tatcttgaagatttcataagct

SEQ ID NO: 3046 - DNA, 22 bp, Artificial Sequence
  Description of Artificial Sequence: Synthetic oligonucleotide
atttcccttaatattatctggt

SEQ ID NO: 3047 - DNA, 22 bp, Artificial Sequence
  Description of Artificial Sequence: Synthetic oligonucleotide
tttcatgataaagtcataggca

SEQ ID NO: 3048 - DNA, 22 bp, Artificial Sequence
  Description of Artificial Sequence: Synthetic oligonucleotide
taacttgagcagcatcattggc

SEQ ID NO: 3049 - DNA, 22 bp, Artificial Sequence
  Description of Artificial Sequence: Synthetic oligonucleotide
attaataatgaaatagccacca

SEQ ID NO: 3050 - DNA, 22 bp, Artificial Sequence
  Description of Artificial Sequence: Synthetic oligonucleotide
aatcttctgcacgttaacagca

SEQ ID NO: 3051 - DNA, 22 bp, Artificial Sequence
  Description of Artificial Sequence: Synthetic oligonucleotide
atttcctctgagatgatagcca

SEQ ID NO: 3052 - DNA, 22 bp, Artificial Sequence
  Description of Artificial Sequence: Synthetic oligonucleotide
atactcatagacataagttcct

SEQ ID NO: 3053 - DNA, 22 bp, Artificial Sequence
  Description of Artificial Sequence: Synthetic oligonucleotide
atagataacaagttattgtgct

SEQ ID NO: 3054 - DNA, 22 bp, Artificial Sequence
  Description of Artificial Sequence: Synthetic oligonucleotide
tttagagaatataaagtacgcc

SEQ ID NO: 3055 - DNA, 22 bp, Artificial Sequence
  Description of Artificial Sequence: Synthetic oligonucleotide
taaatacacagagagcattgct

SEQ ID NO: 3056 - DNA, 22 bp, Artificial Sequence
  Description of Artificial Sequence: Synthetic oligonucleotide
attaaggtaaataataggacgt

SEQ ID NO: 3057 - DNA, 22 bp, Artificial Sequence
  Description of Artificial Sequence: Synthetic oligonucleotide
ataaataaagttacagactcct

SEQ ID NO: 3058 - DNA, 22 bp, Artificial Sequence
  Description of Artificial Sequence: Synthetic oligonucleotide
ttaaaccacaaatatatgtggg

SEQ ID NO: 3059 - DNA, 22 bp, Artificial Sequence
  Description of Artificial Sequence: Synthetic oligonucleotide
atttaagtggcataaatttgga

SEQ ID NO: 3060 - DNA, 22 bp, Artificial Sequence
  Description of Artificial Sequence: Synthetic oligonucleotide
attcgctgaacatttctgagga

SEQ ID NO: 3061 - DNA, 22 bp, Artificial Sequence
  Description of Artificial Sequence: Synthetic oligonucleotide
tattgtggtaagaggatctggg

SEQ ID NO: 3062 - DNA, 22 bp, Artificial Sequence
  Description of Artificial Sequence: Synthetic oligonucleotide
ttatagtctcgatgtccaagga

SEQ ID NO: 3063 - DNA, 22 bp, Artificial Sequence
  Description of Artificial Sequence: Synthetic oligonucleotide
attgcacaacaatgaaacacca

SEQ ID NO: 3064 - DNA, 22 bp, Artificial Sequence
  Description of Artificial Sequence: Synthetic oligonucleotide
tttccaaatgatgagatctgcc

SEQ ID NO: 3065 - DNA, 22 bp, Artificial Sequence
  Description of Artificial Sequence: Synthetic oligonucleotide
ttatccagtagatctcagtgga

SEQ ID NO: 3066 - DNA, 22 bp, Artificial Sequence
  Description of Artificial Sequence: Synthetic oligonucleotide
attcttctgaatacttctgcgg

SEQ ID NO: 3067 - DNA, 22 bp, Artificial Sequence
  Description of Artificial Sequence: Synthetic oligonucleotide
ataacacagttcttatctcggt

SEQ ID NO: 3068 - DNA, 22 bp, Artificial Sequence
  Description of Artificial Sequence: Synthetic oligonucleotide
taaccagaccttcttcttgcca

SEQ ID NO: 3069 - DNA, 22 bp, Artificial Sequence
  Description of Artificial Sequence: Synthetic oligonucleotide
atacagttccaatcagtgtgtc

SEQ ID NO: 3070 - DNA, 22 bp, Artificial Sequence
  Description of Artificial Sequence: Synthetic oligonucleotide
taatacagttccaatcagtgtg

SEQ ID NO: 3071 - DNA, 22 bp, Artificial Sequence
  Description of Artificial Sequence: Synthetic oligonucleotide
attcctatttaaatgccgcccg

SEQ ID NO: 3072 - DNA, 22 bp, Artificial Sequence
  Description of Artificial Sequence: Synthetic oligonucleotide
tttcttgttattgtgctttcct

SEQ ID NO: 3073 - DNA, 22 bp, Artificial Sequence
  Description of Artificial Sequence: Synthetic oligonucleotide
atatccattaccttaaactgca

SEQ ID NO: 3074 - DNA, 22 bp, Artificial Sequence
  Description of Artificial Sequence: Synthetic oligonucleotide
tttctccctgactttcaaacgg

SEQ ID NO: 3075 - DNA, 22 bp, Artificial Sequence
  Description of Artificial Sequence: Synthetic oligonucleotide
tttataattctcatttacggct

SEQ ID NO: 3076 - DNA, 22 bp, Artificial Sequence
  Description of Artificial Sequence: Synthetic oligonucleotide
atgaaggtgcacaggacggcga

SEQ ID NO: 3077 - DNA, 22 bp, Artificial Sequence
  Description of Artificial Sequence: Synthetic oligonucleotide
ttccttctcctctttaactcgg

SEQ ID NO: 3078 - DNA, 22 bp, Artificial Sequence
  Description of Artificial Sequence: Synthetic oligonucleotide
aagatggaggacgctcaggcgt

SEQ ID NO: 3079 - DNA, 22 bp, Artificial Sequence
  Description of Artificial Sequence: Synthetic oligonucleotide
tataataggacagtgtgcaggt

SEQ ID NO: 3080 - DNA, 22 bp, Artificial Sequence
  Description of Artificial Sequence: Synthetic oligonucleotide
ataaatcctgaggccatctggt

SEQ ID NO: 3081 - DNA, 22 bp, Artificial Sequence
  Description of Artificial Sequence: Synthetic oligonucleotide
tttctggaatgctgaaccaggc

SEQ ID NO: 3082 - DNA, 22 bp, Artificial Sequence
  Description of Artificial Sequence: Synthetic oligonucleotide
ataagcaaagtaaggcagacca

SEQ ID NO: 3083 - DNA, 22 bp, Artificial Sequence
  Description of Artificial Sequence: Synthetic oligonucleotide
taatctggaagcttacactggc

SEQ ID NO: 3084 - DNA, 22 bp, Artificial Sequence
  Description of Artificial Sequence: Synthetic oligonucleotide
taatttccaatatcaccgtcgt

SEQ ID NO: 3085 - DNA, 22 bp, Artificial Sequence
  Description of Artificial Sequence: Synthetic oligonucleotide
tataagccataatttaacagca

SEQ ID NO: 3086 - DNA, 22 bp, Artificial Sequence
  Description of Artificial Sequence: Synthetic oligonucleotide
aattgacagcatagtatttgcc

SEQ ID NO: 3087 - DNA, 22 bp, Artificial Sequence
  Description of Artificial Sequence: Synthetic oligonucleotide
aataggcttaaatatctgccca

SEQ ID NO: 3088 - DNA, 22 bp, Artificial Sequence
  Description of Artificial Sequence: Synthetic oligonucleotide
ttatacccacactgaggttggt

SEQ ID NO: 3089 - DNA, 22 bp, Artificial Sequence
  Description of Artificial Sequence: Synthetic oligonucleotide
tttcatatccaggctgtgtcga

SEQ ID NO: 3090 - DNA, 22 bp, Artificial Sequence
  Description of Artificial Sequence: Synthetic oligonucleotide
atattcataaattgagcggcct

SEQ ID NO: 3091 - DNA, 22 bp, Artificial Sequence
  Description of Artificial Sequence: Synthetic oligonucleotide
taaagatatgattgtgtctcca

SEQ ID NO: 3092 - DNA, 22 bp, Artificial Sequence
  Description of Artificial Sequence: Synthetic oligonucleotide
atattcactgggactattaggc

SEQ ID NO: 3093 - DNA, 22 bp, Artificial Sequence
  Description of Artificial Sequence: Synthetic oligonucleotide
attcctctggtgctgccttggc

SEQ ID NO: 3094 - DNA, 22 bp, Artificial Sequence
  Description of Artificial Sequence: Synthetic oligonucleotide
tatacagagccatttctcagca

SEQ ID NO: 3095 - DNA, 22 bp, Artificial Sequence
  Description of Artificial Sequence: Synthetic oligonucleotide
tagaggtcctcgtgggtgcggc

SEQ ID NO: 3096 - DNA, 22 bp, Artificial Sequence
  Description of Artificial Sequence: Synthetic oligonucleotide
aaggagatatggagagggaggc

SEQ ID NO: 3097 - DNA, 22 bp, Artificial Sequence
  Description of Artificial Sequence: Synthetic oligonucleotide
aatattctggaggtttatagct

SEQ ID NO: 3098 - DNA, 22 bp, Artificial Sequence
  Description of Artificial Sequence: Synthetic oligonucleotide
ttctggagttatattcacaggg

SEQ ID NO: 3099 - DNA, 22 bp, Artificial Sequence
  Description of Artificial Sequence: Synthetic oligonucleotide
ttattccagtattacatttccc

SEQ ID NO: 3100 - DNA, 22 bp, Artificial Sequence
  Description of Artificial Sequence: Synthetic oligonucleotide
ttatgatgtgtttgagtgtcca

SEQ ID NO: 3101 - DNA, 22 bp, Artificial Sequence
  Description of Artificial Sequence: Synthetic oligonucleotide
tttgcagatgggtgccagaggt

SEQ ID NO: 3102 - DNA, 22 bp, Artificial Sequence
  Description of Artificial Sequence: Synthetic oligonucleotide
attatcacagaatgtaccagct

SEQ ID NO: 3103 - DNA, 22 bp, Artificial Sequence
  Description of Artificial Sequence: Synthetic oligonucleotide
ttaacaacagagaaacggagcg

SEQ ID NO: 3104 - DNA, 22 bp, Artificial Sequence
  Description of Artificial Sequence: Synthetic oligonucleotide
tatacaggagtttctttctgcc

SEQ ID NO: 3105 - DNA, 22 bp, Artificial Sequence
  Description of Artificial Sequence: Synthetic oligonucleotide
tttaaaggccaactcattggca

SEQ ID NO: 3106 - DNA, 22 bp, Artificial Sequence
  Description of Artificial Sequence: Synthetic oligonucleotide
tattccacagtgattgcatggc

SEQ ID NO: 3107 - DNA, 22 bp, Artificial Sequence
  Description of Artificial Sequence: Synthetic oligonucleotide
tacacctgggtcataggaggcc

SEQ ID NO: 3108 - DNA, 22 bp, Artificial Sequence
  Description of Artificial Sequence: Synthetic oligonucleotide
tattactcaaggacaacctgga

SEQ ID NO: 3109 - DNA, 22 bp, Artificial Sequence
  Description of Artificial Sequence: Synthetic oligonucleotide
ttgatcctggacttgaacaggc

SEQ ID NO: 3110 - DNA, 22 bp, Artificial Sequence
  Description of Artificial Sequence: Synthetic oligonucleotide
atatcactgaggagtaagtcct

SEQ ID NO: 3111 - DNA, 22 bp, Artificial Sequence
  Description of Artificial Sequence: Synthetic oligonucleotide
tttaccttctgcaacagcaggt

SEQ ID NO: 3112 - DNA, 22 bp, Artificial Sequence
  Description of Artificial Sequence: Synthetic oligonucleotide
tatctttgtcaccataacacgg

SEQ ID NO: 3113 - DNA, 22 bp, Artificial Sequence
  Description of Artificial Sequence: Synthetic oligonucleotide
atacctctggagccatgtacct

SEQ ID NO: 3114 - DNA, 22 bp, Artificial Sequence
  Description of Artificial Sequence: Synthetic oligonucleotide
tttgttagtctctgcatctggg

SEQ ID NO: 3115 - DNA, 22 bp, Artificial Sequence
  Description of Artificial Sequence: Synthetic oligonucleotide
tttcctgaataagggcacagga

SEQ ID NO: 3116 - DNA, 22 bp, Artificial Sequence
  Description of Artificial Sequence: Synthetic oligonucleotide
taatacaaagccattcagagcc

SEQ ID NO: 3117 - DNA, 22 bp, Artificial Sequence
  Description of Artificial Sequence: Synthetic oligonucleotide
ttataacagactactgtctggg

SEQ ID NO: 3118 - DNA, 22 bp, Artificial Sequence
  Description of Artificial Sequence: Synthetic oligonucleotide
tttactatcttgaaagagccct

SEQ ID NO: 3119 - DNA, 22 bp, Artificial Sequence
  Description of Artificial Sequence: Synthetic oligonucleotide
ttaaagaatcttggacatacgt

SEQ ID NO: 3120 - DNA, 22 bp, Artificial Sequence
  Description of Artificial Sequence: Synthetic oligonucleotide
atttaatttgttgactctggct

SEQ ID NO: 3121 - DNA, 22 bp, Artificial Sequence
  Description of Artificial Sequence: Synthetic oligonucleotide
tatttaatttgttgactctggc

SEQ ID NO: 3122 - DNA, 22 bp, Artificial Sequence
  Description of Artificial Sequence: Synthetic oligonucleotide
ttctcattctggtacacatggg

SEQ ID NO: 3123 - DNA, 22 bp, Artificial Sequence
  Description of Artificial Sequence: Synthetic oligonucleotide
tttaagatcatctccacctgga

SEQ ID NO: 3124 - DNA, 22 bp, Artificial Sequence
  Description of Artificial Sequence: Synthetic oligonucleotide
tttgattgctgctaaatatcct

SEQ ID NO: 3125 - DNA, 22 bp, Artificial Sequence
  Description of Artificial Sequence: Synthetic oligonucleotide
tatgatttggacttgctgtcgg

SEQ ID NO: 3126 - DNA, 22 bp, Artificial Sequence
  Description of Artificial Sequence: Synthetic oligonucleotide
attgtgaataatgaagtatcct

SEQ ID NO: 3127 - DNA, 22 bp, Artificial Sequence
  Description of Artificial Sequence: Synthetic oligonucleotide
taatggaaaggtttaccttctt

SEQ ID NO: 3128 - DNA, 22 bp, Artificial Sequence
  Description of Artificial Sequence: Synthetic oligonucleotide
attagtgagtagttggcctgga

SEQ ID NO: 3129 - DNA, 22 bp, Artificial Sequence
  Description of Artificial Sequence: Synthetic oligonucleotide
tttccattagtgagtagttggc

SEQ ID NO: 3130 - DNA, 22 bp, Artificial Sequence
  Description of Artificial Sequence: Synthetic oligonucleotide
tttaacactttgatctttccgt

SEQ ID NO: 3131 - DNA, 22 bp, Artificial Sequence
  Description of Artificial Sequence: Synthetic oligonucleotide
ttgattcacagttccatcagct

SEQ ID NO: 3132 - DNA, 22 bp, Artificial Sequence
  Description of Artificial Sequence: Synthetic oligonucleotide
taacatggagtgggtgcagcct

SEQ ID NO: 3133 - DNA, 22 bp, Artificial Sequence
  Description of Artificial Sequence: Synthetic oligonucleotide
ttggaaataacatggaggtcca

SEQ ID NO: 3134 - DNA, 22 bp, Artificial Sequence
  Description of Artificial Sequence: Synthetic oligonucleotide
attgagtgatatgtctccaggc

SEQ ID NO: 3135 - DNA, 22 bp, Artificial Sequence
  Description of Artificial Sequence: Synthetic oligonucleotide
ttagacttgagatctcggtgga

SEQ ID NO: 3136 - DNA, 22 bp, Artificial Sequence
  Description of Artificial Sequence: Synthetic oligonucleotide
taaagataatctggtcacggca

SEQ ID NO: 3137 - DNA, 22 bp, Artificial Sequence
  Description of Artificial Sequence: Synthetic oligonucleotide
aataagctcgaatacatgaccg

SEQ ID NO: 3138 - DNA, 22 bp, Artificial Sequence
  Description of Artificial Sequence: Synthetic oligonucleotide
atcatcgacaatatagccaggt

SEQ ID NO: 3139 - DNA, 22 bp, Artificial Sequence
  Description of Artificial Sequence: Synthetic oligonucleotide
taagaaattccttgaattagcg

SEQ ID NO: 3140 - DNA, 22 bp, Artificial Sequence
  Description of Artificial Sequence: Synthetic oligonucleotide
tagttataaagtagttacagcc

SEQ ID NO: 3141 - DNA, 22 bp, Artificial Sequence
  Description of Artificial Sequence: Synthetic oligonucleotide
atgagaatacccagtgttccca

SEQ ID NO: 3142 - DNA, 22 bp, Artificial Sequence
  Description of Artificial Sequence: Synthetic oligonucleotide
ttaaactttctgggagatggcc

SEQ ID NO: 3143 - DNA, 22 bp, Artificial Sequence
  Description of Artificial Sequence: Synthetic oligonucleotide
taaactaaaggaatgatctgga

SEQ ID NO: 3144 - DNA, 22 bp, Artificial Sequence
  Description of Artificial Sequence: Synthetic oligonucleotide
ttattataagcatgaggtggca

SEQ ID NO: 3145 - DNA, 22 bp, Artificial Sequence
  Description of Artificial Sequence: Synthetic oligonucleotide
tttattataagcatgaggtggc

SEQ ID NO: 3146 - DNA, 22 bp, Artificial Sequence
  Description of Artificial Sequence: Synthetic oligonucleotide
aatcatctagaatcttggagca

SEQ ID NO: 3147 - DNA, 22 bp, Artificial Sequence
  Description of Artificial Sequence: Synthetic oligonucleotide
taacttagatgcttaggatccg

SEQ ID NO: 3148 - DNA, 22 bp, Artificial Sequence
  Description of Artificial Sequence: Synthetic oligonucleotide
taaagatgctatagaacaggcc

SEQ ID NO: 3149 - DNA, 22 bp, Artificial Sequence
  Description of Artificial Sequence: Synthetic oligonucleotide
aagtgttacagtatcctttggg

SEQ ID NO: 3150 - DNA, 22 bp, Artificial Sequence
  Description of Artificial Sequence: Synthetic oligonucleotide
tagttgcttgggatgtagccct

SEQ ID NO: 3151 - DNA, 22 bp, Artificial Sequence
  Description of Artificial Sequence: Synthetic oligonucleotide
ttaaggagacatcgcattccgg

SEQ ID NO: 3152 - DNA, 22 bp, Artificial Sequence
  Description of Artificial Sequence: Synthetic oligonucleotide
atgtgcggacaccataatgctg

SEQ ID NO: 3153 - DNA, 22 bp, Artificial Sequence
  Description of Artificial Sequence: Synthetic oligonucleotide
ataaagtactccacaccaggct

SEQ ID NO: 3154 - DNA, 22 bp, Artificial Sequence
  Description of Artificial Sequence: Synthetic oligonucleotide
atattccggaagatgatctccc

SEQ ID NO: 3155 - DNA, 22 bp, Artificial Sequence
  Description of Artificial Sequence: Synthetic oligonucleotide
ttaatgtcggaaatggttaggt

SEQ ID NO: 3156 - DNA, 22 bp, Artificial Sequence
  Description of Artificial Sequence: Synthetic oligonucleotide
attgtggtgaagatggtctgga

SEQ ID NO: 3157 - DNA, 22 bp, Artificial Sequence
  Description of Artificial Sequence: Synthetic oligonucleotide
aagtctctggtgactagtaggt

SEQ ID NO: 3158 - DNA, 22 bp, Artificial Sequence
  Description of Artificial Sequence: Synthetic oligonucleotide
atacaatacaaagcaatttcct

SEQ ID NO: 3159 - DNA, 22 bp, Artificial Sequence
  Description of Artificial Sequence: Synthetic oligonucleotide
ttatcatcaaactcctcctggg

SEQ ID NO: 3160 - DNA, 22 bp, Artificial Sequence
  Description of Artificial Sequence: Synthetic oligonucleotide
aactgtttatcatcaaactcct

SEQ ID NO: 3161 - DNA, 22 bp, Artificial Sequence
  Description of Artificial Sequence: Synthetic oligonucleotide
tagtctatgagaatcatttccg

SEQ ID NO: 3162 - DNA, 22 bp, Artificial Sequence
  Description of Artificial Sequence: Synthetic oligonucleotide
tagatgaatagatccatcagca

SEQ ID NO: 3163 - DNA, 22 bp, Artificial Sequence
  Description of Artificial Sequence: Synthetic oligonucleotide
aattgggctgggagggcgtggt

SEQ ID NO: 3164 - DNA, 22 bp, Artificial Sequence
  Description of Artificial Sequence: Synthetic oligonucleotide
ttccggtagaagcctcgatggt

SEQ ID NO: 3165 - DNA, 22 bp, Artificial Sequence
  Description of Artificial Sequence: Synthetic oligonucleotide
ttctttaaatgtaagagcaggt

SEQ ID NO: 3166 - DNA, 22 bp, Artificial Sequence
  Description of Artificial Sequence: Synthetic oligonucleotide
tacacagtacttattaccaggg

SEQ ID NO: 3167 - DNA, 22 bp, Artificial Sequence
  Description of Artificial Sequence: Synthetic oligonucleotide
tactcgttggctgagagctggc

SEQ ID NO: 3168 - DNA, 22 bp, Artificial Sequence
  Description of Artificial Sequence: Synthetic oligonucleotide
taatctgcatctctagccaggg

SEQ ID NO: 3169 - DNA, 22 bp, Artificial Sequence
  Description of Artificial Sequence: Synthetic oligonucleotide
atttggttggaattaatctgca

SEQ ID NO: 3170 - DNA, 22 bp, Artificial Sequence
  Description of Artificial Sequence: Synthetic oligonucleotide
taaagtctccatagacagaggt

SEQ ID NO: 3171 - DNA, 22 bp, Artificial Sequence
  Description of Artificial Sequence: Synthetic oligonucleotide
tttcactgtgatgttcatccgc

SEQ ID NO: 3172 - DNA, 22 bp, Artificial Sequence
  Description of Artificial Sequence: Synthetic oligonucleotide
aactatactcagataagtccca

SEQ ID NO: 3173 - DNA, 22 bp, Artificial Sequence
  Description of Artificial Sequence: Synthetic oligonucleotide
atatcctgaaatccatcctggt

SEQ ID NO: 3174 - DNA, 22 bp, Artificial Sequence
  Description of Artificial Sequence: Synthetic oligonucleotide
ttactacattcaagtgtcggct

SEQ ID NO: 3175 - DNA, 22 bp, Artificial Sequence
  Description of Artificial Sequence: Synthetic oligonucleotide
atatcattgaaaccatcctggt

SEQ ID NO: 3176 - DNA, 22 bp, Artificial Sequence
  Description of Artificial Sequence: Synthetic oligonucleotide
tttgtctatatctgtggctcct

SEQ ID NO: 3177 - DNA, 22 bp, Artificial Sequence
  Description of Artificial Sequence: Synthetic oligonucleotide
attctcaaagggttgatctcca

SEQ ID NO: 3178 - DNA, 22 bp, Artificial Sequence
  Description of Artificial Sequence: Synthetic oligonucleotide
ttcttgaaagggcttatgaccg

SEQ ID NO: 3179 - DNA, 22 bp, Artificial Sequence
  Description of Artificial Sequence: Synthetic oligonucleotide
tttctcttctagtaggtgaccc

SEQ ID NO: 3180 - DNA, 22 bp, Artificial Sequence
  Description of Artificial Sequence: Synthetic oligonucleotide
tatctgcaagggactctgggcc

SEQ ID NO: 3181 - DNA, 22 bp, Artificial Sequence
  Description of Artificial Sequence: Synthetic oligonucleotide
ataacaaatgatgccaggaggc

SEQ ID NO: 3182 - DNA, 22 bp, Artificial Sequence
  Description of Artificial Sequence: Synthetic oligonucleotide
aagtattgccaataagaggccc

SEQ ID NO: 3183 - DNA, 22 bp, Artificial Sequence
  Description of Artificial Sequence: Synthetic oligonucleotide
tttcaccaaatcatactgtccc

SEQ ID NO: 3184 - DNA, 22 bp, Artificial Sequence
  Description of Artificial Sequence: Synthetic oligonucleotide
ttatcctccaagtagctcaggg

SEQ ID NO: 3185 - DNA, 22 bp, Artificial Sequence
  Description of Artificial Sequence: Synthetic oligonucleotide
ttagtacacacatttccatgga

SEQ ID NO: 3186 - DNA, 22 bp, Artificial Sequence
  Description of Artificial Sequence: Synthetic oligonucleotide
tttcttgctgccaagtcccggt

SEQ ID NO: 3187 - DNA, 22 bp, Artificial Sequence
  Description of Artificial Sequence: Synthetic oligonucleotide
atgtttgacttctcagtgggct

SEQ ID NO: 3188 - DNA, 22 bp, Artificial Sequence
  Description of Artificial Sequence: Synthetic oligonucleotide
ataaatggtcacagcacatgcc

SEQ ID NO: 3189 - DNA, 22 bp, Artificial Sequence
  Description of Artificial Sequence: Synthetic oligonucleotide
atttggtgactttgatacaggc

SEQ ID NO: 3190 - DNA, 22 bp, Artificial Sequence
  Description of Artificial Sequence: Synthetic oligonucleotide
ttgaagttggaaacaatcacgg

SEQ ID NO: 3191 - DNA, 22 bp, Artificial Sequence
  Description of Artificial Sequence: Synthetic oligonucleotide
atttactacgaattgatgtgct

SEQ ID NO: 3192 - DNA, 22 bp, Artificial Sequence
  Description of Artificial Sequence: Synthetic oligonucleotide
atatgcacagaacttcacagga

SEQ ID NO: 3193 - DNA, 22 bp, Artificial Sequence
  Description of Artificial Sequence: Synthetic oligonucleotide
atatctaacattccaaacacca

SEQ ID NO: 3194 - DNA, 22 bp, Artificial Sequence
  Description of Artificial Sequence: Synthetic oligonucleotide
tttcatttgggtctcaaagcgt

SEQ ID NO: 3195 - DNA, 22 bp, Artificial Sequence
  Description of Artificial Sequence: Synthetic oligonucleotide
atttcttgagcaaattagaggg

SEQ ID NO: 3196 - DNA, 22 bp, Artificial Sequence
  Description of Artificial Sequence: Synthetic oligonucleotide
ttaatgaagccctcatcctcgc

SEQ ID NO: 3197 - DNA, 22 bp, Artificial Sequence
  Description of Artificial Sequence: Synthetic oligonucleotide
taaccaagaccgagacgatggc

SEQ ID NO: 3198 - DNA, 22 bp, Artificial Sequence
  Description of Artificial Sequence: Synthetic oligonucleotide
ttcttcaagaacatactctgcc

SEQ ID NO: 3199 - DNA, 22 bp, Artificial Sequence
  Description of Artificial Sequence: Synthetic oligonucleotide
ttcatatgacagaagctgggca

SEQ ID NO: 3200 - DNA, 22 bp, Artificial Sequence
  Description of Artificial Sequence: Synthetic oligonucleotide
taaaccacatatttcatgccca

SEQ ID NO: 3201 - DNA, 22 bp, Artificial Sequence
  Description of Artificial Sequence: Synthetic oligonucleotide
ttaaacagggtctctggatggc

SEQ ID NO: 3202 - DNA, 22 bp, Artificial Sequence
  Description of Artificial Sequence: Synthetic oligonucleotide
attgagggagatacagaagcgg

SEQ ID NO: 3203 - DNA, 22 bp, Artificial Sequence
  Description of Artificial Sequence: Synthetic oligonucleotide
tttaccaaatacctactctgca

SEQ ID NO: 3204 - DNA, 22 bp, Artificial Sequence
  Description of Artificial Sequence: Synthetic oligonucleotide
tttgcttctggtagtacttgga

SEQ ID NO: 3205 - DNA, 22 bp, Artificial Sequence
  Description of Artificial Sequence: Synthetic oligonucleotide
ttgctgtgcaattctccaagga

SEQ ID NO: 3206 - DNA, 22 bp, Artificial Sequence
  Description of Artificial Sequence: Synthetic oligonucleotide
ttccatgtttagaacatgagca

SEQ ID NO: 3207 - DNA, 22 bp, Artificial Sequence
  Description of Artificial Sequence: Synthetic oligonucleotide
aatttgaagagttgtattagcc

SEQ ID NO: 3208 - DNA, 22 bp, Artificial Sequence
  Description of Artificial Sequence: Synthetic oligonucleotide
tttgtcactgagacagcttggc

SEQ ID NO: 3209 - DNA, 22 bp, Artificial Sequence
  Description of Artificial Sequence: Synthetic oligonucleotide
tataaatatcccgggccaagcc

SEQ ID NO: 3210 - DNA, 22 bp, Artificial Sequence
  Description of Artificial Sequence: Synthetic oligonucleotide
ttagcttgcaagagatttccca

SEQ ID NO: 3211 - DNA, 22 bp, Artificial Sequence
  Description of Artificial Sequence: Synthetic oligonucleotide
ttacttctggttcttctaacgg

SEQ ID NO: 3212 - DNA, 22 bp, Artificial Sequence
  Description of Artificial Sequence: Synthetic oligonucleotide
taacagaggcactagaagtcgt

SEQ ID NO: 3213 - DNA, 22 bp, Artificial Sequence
  Description of Artificial Sequence: Synthetic oligonucleotide
ttgaggttctgcatggttagct

SEQ ID NO: 3214 - DNA, 22 bp, Artificial Sequence
  Description of Artificial Sequence: Synthetic oligonucleotide
ttcaataccgctgatcagcgcc

SEQ ID NO: 3215 - DNA, 22 bp, Artificial Sequence
  Description of Artificial Sequence: Synthetic oligonucleotide
ataaatagaaatcatgccaggt

SEQ ID NO: 3216 - DNA, 22 bp, Artificial Sequence
  Description of Artificial Sequence: Synthetic oligonucleotide
aatatctgccaggaacagtgcg

SEQ ID NO: 3217 - DNA, 22 bp, Artificial Sequence
  Description of Artificial Sequence: Synthetic oligonucleotide
atttgctcagagcacccatggc

SEQ ID NO: 3218 - DNA, 22 bp, Artificial Sequence
  Description of Artificial Sequence: Synthetic oligonucleotide
ttcttgttctcgcggaccaggc

SEQ ID NO: 3219 - DNA, 22 bp, Artificial Sequence
  Description of Artificial Sequence: Synthetic oligonucleotide
atgttaaaggccatccgttgct

SEQ ID NO: 3220 - DNA, 22 bp, Artificial Sequence
  Description of Artificial Sequence: Synthetic oligonucleotide
attccagtagctgaagtttcct

SEQ ID NO: 3221 - DNA, 22 bp, Artificial Sequence
  Description of Artificial Sequence: Synthetic oligonucleotide
atgactgaagaatcagaatggc

SEQ ID NO: 3222 - DNA, 22 bp, Artificial Sequence
  Description of Artificial Sequence: Synthetic oligonucleotide
atttgttcatcctttccaagga

SEQ ID NO: 3223 - DNA, 22 bp, Artificial Sequence
  Description of Artificial Sequence: Synthetic oligonucleotide
aattggcatgctggtcaaaggc

SEQ ID NO: 3224 - DNA, 22 bp, Artificial Sequence
  Description of Artificial Sequence: Synthetic oligonucleotide
attgagatcaatatcatcacgg

SEQ ID NO: 3225 - DNA, 22 bp, Artificial Sequence
  Description of Artificial Sequence: Synthetic oligonucleotide
atcagttccagcagaatgaggc

SEQ ID NO: 3226 - DNA, 22 bp, Artificial Sequence
  Description of Artificial Sequence: Synthetic oligonucleotide
aatgggaaagcaatccagtgct

SEQ ID NO: 3227 - DNA, 22 bp, Artificial Sequence
  Description of Artificial Sequence: Synthetic oligonucleotide
ttagaagcatctgcagggtggg

SEQ ID NO: 3228 - DNA, 22 bp, Artificial Sequence
  Description of Artificial Sequence: Synthetic oligonucleotide
tttcattggctttctctgtggc

SEQ ID NO: 3229 - DNA, 22 bp, Artificial Sequence
  Description of Artificial Sequence: Synthetic oligonucleotide
ttctctaataaggaaagctcca

SEQ ID NO: 3230 - DNA, 22 bp, Artificial Sequence
  Description of Artificial Sequence: Synthetic oligonucleotide
taatcatgtcgctgatacaggg

SEQ ID NO: 3231 - DNA, 22 bp, Artificial Sequence
  Description of Artificial Sequence: Synthetic oligonucleotide
ataaatagactgagtttccggg

SEQ ID NO: 3232 - DNA, 22 bp, Artificial Sequence
  Description of Artificial Sequence: Synthetic oligonucleotide
atttgctcaaaggctaaatgga

SEQ ID NO: 3233 - DNA, 22 bp, Artificial Sequence
  Description of Artificial Sequence: Synthetic oligonucleotide
tatggtactaacataggttcga

SEQ ID NO: 3234 - DNA, 22 bp, Artificial Sequence
  Description of Artificial Sequence: Synthetic oligonucleotide
ataaattaaagtttgaccagga

SEQ ID NO: 3235 - DNA, 22 bp, Artificial Sequence
  Description of Artificial Sequence: Synthetic oligonucleotide
taaactaacaaactcatgacct

SEQ ID NO: 3236 - DNA, 22 bp, Artificial Sequence
  Description of Artificial Sequence: Synthetic oligonucleotide
attatggtctctcataagccga

SEQ ID NO: 3237 - DNA, 22 bp, Artificial Sequence
  Description of Artificial Sequence: Synthetic oligonucleotide
ttgtgatgacgctggtggcggc

SEQ ID NO: 3238 - DNA, 22 bp, Artificial Sequence
  Description of Artificial Sequence: Synthetic oligonucleotide
ttactattgtgatgacgctggt

SEQ ID NO: 3239 - DNA, 22 bp, Artificial Sequence
  Description of Artificial Sequence: Synthetic oligonucleotide
ataactgagttcgataggtcca

SEQ ID NO: 3240 - DNA, 22 bp, Artificial Sequence
  Description of Artificial Sequence: Synthetic oligonucleotide
attgacagtgatctgaagtccg

SEQ ID NO: 3241 - DNA, 22 bp, Artificial Sequence
  Description of Artificial Sequence: Synthetic oligonucleotide
atgtggttcccagagcacaggt

SEQ ID NO: 3242 - DNA, 22 bp, Artificial Sequence
  Description of Artificial Sequence: Synthetic oligonucleotide
attaaagcccagatcccaggca

SEQ ID NO: 3243 - DNA, 22 bp, Artificial Sequence
  Description of Artificial Sequence: Synthetic oligonucleotide
tttgtgaagttcataacatgct

SEQ ID NO: 3244 - DNA, 22 bp, Artificial Sequence
  Description of Artificial Sequence: Synthetic oligonucleotide
aattgactacattctttgccca

SEQ ID NO: 3245 - DNA, 22 bp, Artificial Sequence
  Description of Artificial Sequence: Synthetic oligonucleotide
tttctggattggtaactgaggg

SEQ ID NO: 3246 - DNA, 22 bp, Artificial Sequence
  Description of Artificial Sequence: Synthetic oligonucleotide
attatctaaactacttgagcca

SEQ ID NO: 3247 - DNA, 22 bp, Artificial Sequence
  Description of Artificial Sequence: Synthetic oligonucleotide
attaacaaggctgctgagccct

SEQ ID NO: 3248 - DNA, 22 bp, Artificial Sequence
  Description of Artificial Sequence: Synthetic oligonucleotide
tttatcttcaaagtacaatgca

SEQ ID NO: 3249 - DNA, 22 bp, Artificial Sequence
  Description of Artificial Sequence: Synthetic oligonucleotide
gactgagatcagttcctgtgga

SEQ ID NO: 3250 - DNA, 22 bp, Artificial Sequence
  Description of Artificial Sequence: Synthetic oligonucleotide
attaggtcggaggttcccaggc

SEQ ID NO: 3251 - DNA, 22 bp, Artificial Sequence
  Description of Artificial Sequence: Synthetic oligonucleotide
ataaaccagcatcctgaatggt

SEQ ID NO: 3252 - DNA, 22 bp, Artificial Sequence
  Description of Artificial Sequence: Synthetic oligonucleotide
tttccatttcacttggtgagcc

SEQ ID NO: 3253 - DNA, 22 bp, Artificial Sequence
  Description of Artificial Sequence: Synthetic oligonucleotide
aattcctaacaaagaacttgct

SEQ ID NO: 3254 - DNA, 22 bp, Artificial Sequence
  Description of Artificial Sequence: Synthetic oligonucleotide
atttgtaaacaatatcttgcat

SEQ ID NO: 3255 - DNA, 22 bp, Artificial Sequence
  Description of Artificial Sequence: Synthetic oligonucleotide
ttcacagatctctgtatcagct

SEQ ID NO: 3256 - DNA, 22 bp, Artificial Sequence
  Description of Artificial Sequence: Synthetic oligonucleotide
ttctatcacaatattcacagat

SEQ ID NO: 3257 - DNA, 22 bp, Artificial Sequence
  Description of Artificial Sequence: Synthetic oligonucleotide
taaattagtgagattctcatgc

SEQ ID NO: 3258 - DNA, 22 bp, Artificial Sequence
  Description of Artificial Sequence: Synthetic oligonucleotide
ataaatgcacactgcacatgca

SEQ ID NO: 3259 - DNA, 22 bp, Artificial Sequence
  Description of Artificial Sequence: Synthetic oligonucleotide
ctagtggataacttagcagtgg

SEQ ID NO: 3260 - DNA, 22 bp, Artificial Sequence
  Description of Artificial Sequence: Synthetic oligonucleotide
tttgaaatagtcaaagcgggac

SEQ ID NO: 3261 - DNA, 22 bp, Artificial Sequence
  Description of Artificial Sequence: Synthetic oligonucleotide
aattctccgggtaatagacgga

SEQ ID NO: 3262 - DNA, 22 bp, Artificial Sequence
  Description of Artificial Sequence: Synthetic oligonucleotide
ttcgaagatgatgctgtgggca

SEQ ID NO: 3263 - DNA, 22 bp, Artificial Sequence
  Description of Artificial Sequence: Synthetic oligonucleotide
ttatgtgtttgttaactttgcg

SEQ ID NO: 3264 - DNA, 22 bp, Artificial Sequence
  Description of Artificial Sequence: Synthetic oligonucleotide
attagagagatgactatttgcg

SEQ ID NO: 3265 - DNA, 22 bp, Artificial Sequence
  Description of Artificial Sequence: Synthetic oligonucleotide
aataaacatgatttcttctggc

SEQ ID NO: 3266 - DNA, 22 bp, Artificial Sequence
  Description of Artificial Sequence: Synthetic oligonucleotide
attggaaatgcctttgtctgcc

SEQ ID NO: 3267 - DNA, 22 bp, Artificial Sequence
  Description of Artificial Sequence: Synthetic oligonucleotide
atggtgctttacattagaggca

SEQ ID NO: 3268 - DNA, 22 bp, Artificial Sequence
  Description of Artificial Sequence: Synthetic oligonucleotide
taaggatttgggaacatttggt

SEQ ID NO: 3269 - DNA, 22 bp, Artificial Sequence
  Description of Artificial Sequence: Synthetic oligonucleotide
taaagatttcaaataaataggg

SEQ ID NO: 3270 - DNA, 22 bp, Artificial Sequence
  Description of Artificial Sequence: Synthetic oligonucleotide
taaatgaagtagagacagccca

SEQ ID NO: 3271 - DNA, 22 bp, Artificial Sequence
  Description of Artificial Sequence: Synthetic oligonucleotide
atagatattaacaacatgaggt

SEQ ID NO: 3272 - DNA, 22 bp, Artificial Sequence
  Description of Artificial Sequence: Synthetic oligonucleotide
atatgtattgagtgacaatggc

SEQ ID NO: 3273 - DNA, 22 bp, Artificial Sequence
  Description of Artificial Sequence: Synthetic oligonucleotide
tttgatctgctggtacaggcgg

SEQ ID NO: 3274 - DNA, 22 bp, Artificial Sequence
  Description of Artificial Sequence: Synthetic oligonucleotide
ttgcttatggcttcaatcagct

SEQ ID NO: 3275 - DNA, 22 bp, Artificial Sequence
  Description of Artificial Sequence: Synthetic oligonucleotide
atatccattaacgcgaaatcca

SEQ ID NO: 3276 - DNA, 22 bp, Artificial Sequence
  Description of Artificial Sequence: Synthetic oligonucleotide
atttggcatcaaagaggtggca

SEQ ID NO: 3277 - DNA, 22 bp, Artificial Sequence
  Description of Artificial Sequence: Synthetic oligonucleotide
tacgtttaagagtctctctccc

SEQ ID NO: 3278 - DNA, 22 bp, Artificial Sequence
  Description of Artificial Sequence: Synthetic oligonucleotide
ttgagctgcagcagcagctgcc

SEQ ID NO: 3279 - DNA, 22 bp, Artificial Sequence
  Description of Artificial Sequence: Synthetic oligonucleotide
ttaaactctgataatgtctcgc

SEQ ID NO: 3280 - DNA, 22 bp, Artificial Sequence
  Description of Artificial Sequence: Synthetic oligonucleotide
atacagtctcccattaacagga

SEQ ID NO: 3281 - DNA, 22 bp, Artificial Sequence
  Description of Artificial Sequence: Synthetic oligonucleotide
attgccaaacgtgcactgagcc

SEQ ID NO: 3282 - DNA, 22 bp, Artificial Sequence
  Description of Artificial Sequence: Synthetic oligonucleotide
aattacagataaggaatatcgt

SEQ ID NO: 3283 - DNA, 22 bp, Artificial Sequence
  Description of Artificial Sequence: Synthetic oligonucleotide
tttctcttgcaaatctggaggt

SEQ ID NO: 3284 - DNA, 22 bp, Artificial Sequence
  Description of Artificial Sequence: Synthetic oligonucleotide
atattgtcccagaatccttcca

SEQ ID NO: 3285 - DNA, 22 bp, Artificial Sequence
  Description of Artificial Sequence: Synthetic oligonucleotide
aattcatctgatgtacatggct

SEQ ID NO: 3286 - DNA, 22 bp, Artificial Sequence
  Description of Artificial Sequence: Synthetic oligonucleotide
taattgtgagccactttatgca

SEQ ID NO: 3287 - DNA, 22 bp, Artificial Sequence
  Description of Artificial Sequence: Synthetic oligonucleotide
ttatcaccaagtaaacagaccc

SEQ ID NO: 3288 - DNA, 22 bp, Artificial Sequence
  Description of Artificial Sequence: Synthetic oligonucleotide
taataatgaaacatgaatgcca

SEQ ID NO: 3289 - DNA, 22 bp, Artificial Sequence
  Description of Artificial Sequence: Synthetic oligonucleotide
taaagccagcacggagaatgcg

SEQ ID NO: 3290 - DNA, 22 bp, Artificial Sequence
  Description of Artificial Sequence: Synthetic oligonucleotide
taaatgtttctgaatttgagca

SEQ ID NO: 3291 - DNA, 22 bp, Artificial Sequence
  Description of Artificial Sequence: Synthetic oligonucleotide
tatggagatgaaatttgaggcc

SEQ ID NO: 3292 - DNA, 22 bp, Artificial Sequence
  Description of Artificial Sequence: Synthetic oligonucleotide
ttaaagtttatccgatccagct

SEQ ID NO: 3293 - DNA, 22 bp, Artificial Sequence
  Description of Artificial Sequence: Synthetic oligonucleotide
aatatacaccactgaacaccga

SEQ ID NO: 3294 - DNA, 22 bp, Artificial Sequence
  Description of Artificial Sequence: Synthetic oligonucleotide
attctgaagcaataaacatgct

SEQ ID NO: 3295 - DNA, 22 bp, Artificial Sequence
  Description of Artificial Sequence: Synthetic oligonucleotide
ataaacatgcttctgcagagct

SEQ ID NO: 3296 - DNA, 22 bp, Artificial Sequence
  Description of Artificial Sequence: Synthetic oligonucleotide
atgatcatacagcccaaagccc

SEQ ID NO: 3297 - DNA, 22 bp, Artificial Sequence
  Description of Artificial Sequence: Synthetic oligonucleotide
ataactctgactttgatctcct

SEQ ID NO: 3298 - DNA, 22 bp, Artificial Sequence
  Description of Artificial Sequence: Synthetic oligonucleotide
ttagatatggaggcaacttggt

SEQ ID NO: 3299 - DNA, 22 bp, Artificial Sequence
  Description of Artificial Sequence: Synthetic oligonucleotide
aagtggtaccatcatatgcccg

SEQ ID NO: 3300 - DNA, 22 bp, Artificial Sequence
  Description of Artificial Sequence: Synthetic oligonucleotide
aatgaggaggaagttgttggct

SEQ ID NO: 3301 - DNA, 22 bp, Artificial Sequence
  Description of Artificial Sequence: Synthetic oligonucleotide
atgatcccagagttcaattcct

SEQ ID NO: 3302 - DNA, 22 bp, Artificial Sequence
  Description of Artificial Sequence: Synthetic oligonucleotide
ttcttcatacacaggcttgcgg

SEQ ID NO: 3303 - DNA, 22 bp, Artificial Sequence
  Description of Artificial Sequence: Synthetic oligonucleotide
ttaatagcaacgacttgctggg

SEQ ID NO: 3304 - DNA, 22 bp, Artificial Sequence
  Description of Artificial Sequence: Synthetic oligonucleotide
aattgttacaatataggcacca

SEQ ID NO: 3305 - DNA, 22 bp, Artificial Sequence
  Description of Artificial Sequence: Synthetic oligonucleotide
ttaacccataacatgagttgca

SEQ ID NO: 3306 - DNA, 22 bp, Artificial Sequence
  Description of Artificial Sequence: Synthetic oligonucleotide
ttaggatctgctctacattcct

SEQ ID NO: 3307 - DNA, 22 bp, Artificial Sequence
  Description of Artificial Sequence: Synthetic oligonucleotide
atattctcagatatccatccct

SEQ ID NO: 3308 - DNA, 22 bp, Artificial Sequence
  Description of Artificial Sequence: Synthetic oligonucleotide
ttcaaattacttactctttcct

SEQ ID NO: 3309 - DNA, 22 bp, Artificial Sequence
  Description of Artificial Sequence: Synthetic oligonucleotide
aatttcggacagattccatggt

SEQ ID NO: 3310 - DNA, 22 bp, Artificial Sequence
  Description of Artificial Sequence: Synthetic oligonucleotide
tttaaatgcaagagctcctcca

SEQ ID NO: 3311 - DNA, 22 bp, Artificial Sequence
  Description of Artificial Sequence: Synthetic oligonucleotide
taaatctaaatgactctgtgcc

SEQ ID NO: 3312 - DNA, 22 bp, Artificial Sequence
  Description of Artificial Sequence: Synthetic oligonucleotide
ttcaaataaacaatacataggg

SEQ ID NO: 3313 - DNA, 22 bp, Artificial Sequence
  Description of Artificial Sequence: Synthetic oligonucleotide
cttcatatactgttccagctgc

SEQ ID NO: 3314 - DNA, 22 bp, Artificial Sequence
  Description of Artificial Sequence: Synthetic oligonucleotide
tttccttcaggatgtccaggca

SEQ ID NO: 3315 - DNA, 22 bp, Artificial Sequence
  Description of Artificial Sequence: Synthetic oligonucleotide
ataaaggttgcattgctctgca

SEQ ID NO: 3316 - DNA, 22 bp, Artificial Sequence
  Description of Artificial Sequence: Synthetic oligonucleotide
tttactaatcacagcatccggt

SEQ ID NO: 3317 - DNA, 22 bp, Artificial Sequence
  Description of Artificial Sequence: Synthetic oligonucleotide
tttacttattccaaactgggct

SEQ ID NO: 3318 - DNA, 22 bp, Artificial Sequence
  Description of Artificial Sequence: Synthetic oligonucleotide
tatactgttccagctgctccat

SEQ ID NO: 3319 - DNA, 22 bp, Artificial Sequence
  Description of Artificial Sequence: Synthetic oligonucleotide
atcttctgtgacagtagtagcc

SEQ ID NO: 3320 - DNA, 22 bp, Artificial Sequence
  Description of Artificial Sequence: Synthetic oligonucleotide
tttctgtaacactttgctaccc

SEQ ID NO: 3321 - DNA, 22 bp, Artificial Sequence
  Description of Artificial Sequence: Synthetic oligonucleotide
ttctgtgaggatcctttgcttc

SEQ ID NO: 3322 - DNA, 22 bp, Artificial Sequence
  Description of Artificial Sequence: Synthetic oligonucleotide
aataggaatgttattctgggcc

SEQ ID NO: 3323 - DNA, 22 bp, Artificial Sequence
  Description of Artificial Sequence: Synthetic oligonucleotide
aatgatatacacgggaacacgt

SEQ ID NO: 3324 - DNA, 22 bp, Artificial Sequence
  Description of Artificial Sequence: Synthetic oligonucleotide
ttacttatggaattgctgagct

SEQ ID NO: 3325 - DNA, 22 bp, Artificial Sequence
  Description of Artificial Sequence: Synthetic oligonucleotide
ttatatcttcctgttgttgggc

SEQ ID NO: 3326 - DNA, 22 bp, Artificial Sequence
  Description of Artificial Sequence: Synthetic oligonucleotide
ttgttcaagcaatgtaatagct

SEQ ID NO: 3327 - DNA, 22 bp, Artificial Sequence
  Description of Artificial Sequence: Synthetic oligonucleotide
aagataaatgatgcaaaggcca

SEQ ID NO: 3328 - DNA, 22 bp, Artificial Sequence
  Description of Artificial Sequence: Synthetic oligonucleotide
tattcaaagtaattaactggca

SEQ ID NO: 3329 - DNA, 22 bp, Artificial Sequence
  Description of Artificial Sequence: Synthetic oligonucleotide
taaattcttcagctgctgcgcc

SEQ ID NO: 3330 - DNA, 22 bp, Artificial Sequence
  Description of Artificial Sequence: Synthetic oligonucleotide
ataaaggccaatattccaagcc

SEQ ID NO: 3331 - DNA, 22 bp, Artificial Sequence
  Description of Artificial Sequence: Synthetic oligonucleotide
ttctggaatccaatattaggca

SEQ ID NO: 3332 - DNA, 22 bp, Artificial Sequence
  Description of Artificial Sequence: Synthetic oligonucleotide
atataacagaccattaactgca

SEQ ID NO: 3333 - DNA, 22 bp, Artificial Sequence
  Description of Artificial Sequence: Synthetic oligonucleotide
attctaactctctttgctcggc

SEQ ID NO: 3334 - DNA, 22 bp, Artificial Sequence
  Description of Artificial Sequence: Synthetic oligonucleotide
tttaatttgcacaaaggaggca

SEQ ID NO: 3335 - DNA, 22 bp, Artificial Sequence
  Description of Artificial Sequence: Synthetic oligonucleotide
gaaataaaggaaatattacgga

SEQ ID NO: 3336 - DNA, 22 bp, Artificial Sequence
  Description of Artificial Sequence: Synthetic oligonucleotide
atatgcagtgggagtggaggca

SEQ ID NO: 3337 - DNA, 22 bp, Artificial Sequence
  Description of Artificial Sequence: Synthetic oligonucleotide
tttaggaatgactgaggtaggt

SEQ ID NO: 3338 - DNA, 22 bp, Artificial Sequence
  Description of Artificial Sequence: Synthetic oligonucleotide
tttaggttgcaatatattgcgt

SEQ ID NO: 3339 - DNA, 22 bp, Artificial Sequence
  Description of Artificial Sequence: Synthetic oligonucleotide
taatcttgagcatctgttacct

SEQ ID NO: 3340 - DNA, 22 bp, Artificial Sequence
  Description of Artificial Sequence: Synthetic oligonucleotide
ataaagtcttaaagaaacggct

SEQ ID NO: 3341 - DNA, 22 bp, Artificial Sequence
  Description of Artificial Sequence: Synthetic oligonucleotide
attcgtttcattattaggtgga

SEQ ID NO: 3342 - DNA, 22 bp, Artificial Sequence
  Description of Artificial Sequence: Synthetic oligonucleotide
ttagtgttcgtctgtatttggc

SEQ ID NO: 3343 - DNA, 22 bp, Artificial Sequence
  Description of Artificial Sequence: Synthetic oligonucleotide
tagtggcatcagttgcaatgga

SEQ ID NO: 3344 - DNA, 22 bp, Artificial Sequence
  Description of Artificial Sequence: Synthetic oligonucleotide
ttatcaggtgaattggtcaggg

SEQ ID NO: 3345 - DNA, 22 bp, Artificial Sequence
  Description of Artificial Sequence: Synthetic oligonucleotide
ttatttgaagctccagggtggg

SEQ ID NO: 3346 - DNA, 22 bp, Artificial Sequence
  Description of Artificial Sequence: Synthetic oligonucleotide
atgtgtaaacagagtaaacgga

SEQ ID NO: 3347 - DNA, 22 bp, Artificial Sequence
  Description of Artificial Sequence: Synthetic oligonucleotide
aattgggatcatctggtgagct

SEQ ID NO: 3348 - DNA, 22 bp, Artificial Sequence
  Description of Artificial Sequence: Synthetic oligonucleotide
ttcattgctgacataacgtggc

SEQ ID NO: 3349 - DNA, 22 bp, Artificial Sequence
  Description of Artificial Sequence: Synthetic oligonucleotide
ataaatctgacatttaaaccct

SEQ ID NO: 3350 - DNA, 22 bp, Artificial Sequence
  Description of Artificial Sequence: Synthetic oligonucleotide
tttctgcatcacttgtacaggt

SEQ ID NO: 3351 - DNA, 22 bp, Artificial Sequence
  Description of Artificial Sequence: Synthetic oligonucleotide
ataccacttgagatgattaccc

SEQ ID NO: 3352 - DNA, 22 bp, Artificial Sequence
  Description of Artificial Sequence: Synthetic oligonucleotide
ttagcatctgcctttaattgcc

SEQ ID NO: 3353 - DNA, 22 bp, Artificial Sequence
  Description of Artificial Sequence: Synthetic oligonucleotide
taaagtgattacagctactcca

SEQ ID NO: 3354 - DNA, 22 bp, Artificial Sequence
  Description of Artificial Sequence: Synthetic oligonucleotide
atataccaatcaattaagtcca

SEQ ID NO: 3355 - DNA, 22 bp, Artificial Sequence
  Description of Artificial Sequence: Synthetic oligonucleotide
ttctgaagaaagactgtttccc

SEQ ID NO: 3356 - DNA, 22 bp, Artificial Sequence
  Description of Artificial Sequence: Synthetic oligonucleotide
ttagagcttgcaagtttgcttc

SEQ ID NO: 3357 - DNA, 22 bp, Artificial Sequence
  Description of Artificial Sequence: Synthetic oligonucleotide
ttatataatggattaacctgtg

SEQ ID NO: 3358 - DNA, 22 bp, Artificial Sequence
  Description of Artificial Sequence: Synthetic oligonucleotide
tttcctcaggcctctcattggt

SEQ ID NO: 3359 - DNA, 22 bp, Artificial Sequence
  Description of Artificial Sequence: Synthetic oligonucleotide
attaactttaacttccctgggc

SEQ ID NO: 3360 - DNA, 22 bp, Artificial Sequence
  Description of Artificial Sequence: Synthetic oligonucleotide
tttgtgtcacaagaatactccc

SEQ ID NO: 3361 - DNA, 22 bp, Artificial Sequence
  Description of Artificial Sequence: Synthetic oligonucleotide
aataacatcctgacaatctgca

SEQ ID NO: 3362 - DNA, 22 bp, Artificial Sequence
  Description of Artificial Sequence: Synthetic oligonucleotide
tttgacattcagctcatcccga

SEQ ID NO: 3363 - DNA, 22 bp, Artificial Sequence
  Description of Artificial Sequence: Synthetic oligonucleotide
attctgtctgaaaggaactggg

SEQ ID NO: 3364 - DNA, 22 bp, Artificial Sequence
  Description of Artificial Sequence: Synthetic oligonucleotide
ttcaagtttcaactttaatccc

SEQ ID NO: 3365 - DNA, 22 bp, Artificial Sequence
  Description of Artificial Sequence: Synthetic oligonucleotide
atcactaataaaggtaaatcct

SEQ ID NO: 3366 - DNA, 22 bp, Artificial Sequence
  Description of Artificial Sequence: Synthetic oligonucleotide
tatatgtgacctactttaaccc

SEQ ID NO: 3367 - DNA, 22 bp, Artificial Sequence
  Description of Artificial Sequence: Synthetic oligonucleotide
ttgaagttagacctcttctggt

SEQ ID NO: 3368 - DNA, 22 bp, Artificial Sequence
  Description of Artificial Sequence: Synthetic oligonucleotide
tttacagaacaccatctcaggc

SEQ ID NO: 3369 - DNA, 22 bp, Artificial Sequence
  Description of Artificial Sequence: Synthetic oligonucleotide
aattgaatgggaaatgtctgcc

SEQ ID NO: 3370 - DNA, 22 bp, Artificial Sequence
  Description of Artificial Sequence: Synthetic oligonucleotide
ttctatgagcagagtacctggc

SEQ ID NO: 3371 - DNA, 22 bp, Artificial Sequence
  Description of Artificial Sequence: Synthetic oligonucleotide
tttcatctagggataagaaggc

SEQ ID NO: 3372 - DNA, 22 bp, Artificial Sequence
  Description of Artificial Sequence: Synthetic oligonucleotide
ataatcagtattcttattccct

SEQ ID NO: 3373 - DNA, 22 bp, Artificial Sequence
  Description of Artificial Sequence: Synthetic oligonucleotide
tttgatctcctcttgcttggct

SEQ ID NO: 3374 - DNA, 22 bp, Artificial Sequence
  Description of Artificial Sequence: Synthetic oligonucleotide
ataacatcacaaagttgctgct

SEQ ID NO: 3375 - DNA, 22 bp, Artificial Sequence
  Description of Artificial Sequence: Synthetic oligonucleotide
atatgccacccggtgccttggg

SEQ ID NO: 3376 - DNA, 22 bp, Artificial Sequence
  Description of Artificial Sequence: Synthetic oligonucleotide
ttatagcttcagcaataaaggc

SEQ ID NO: 3377 - DNA, 22 bp, Artificial Sequence
  Description of Artificial Sequence: Synthetic oligonucleotide
attattctgggacatatacgga

SEQ ID NO: 3378 - DNA, 22 bp, Artificial Sequence
  Description of Artificial Sequence: Synthetic oligonucleotide
ttatcagatgagtatttgagca

SEQ ID NO: 3379 - DNA, 22 bp, Artificial Sequence
  Description of Artificial Sequence: Synthetic oligonucleotide
tttggataagtcactctttggt

SEQ ID NO: 3380 - DNA, 22 bp, Artificial Sequence
  Description of Artificial Sequence: Synthetic oligonucleotide
tttctggagcaacaaattccgg

SEQ ID NO: 3381 - DNA, 22 bp, Artificial Sequence
  Description of Artificial Sequence: Synthetic oligonucleotide
ttatccatgatcctaattagcg

SEQ ID NO: 3382 - DNA, 22 bp, Artificial Sequence
  Description of Artificial Sequence: Synthetic oligonucleotide
tttgtagatgtgcacattggct

SEQ ID NO: 3383 - DNA, 22 bp, Artificial Sequence
  Description of Artificial Sequence: Synthetic oligonucleotide
gataaattggagtgagaaatcg

SEQ ID NO: 3384 - DNA, 22 bp, Artificial Sequence
  Description of Artificial Sequence: Synthetic oligonucleotide
aacacctttctcataaggtgtg

SEQ ID NO: 3385 - DNA, 22 bp, Artificial Sequence
  Description of Artificial Sequence: Synthetic oligonucleotide
attaactaagatgaaccaggac

SEQ ID NO: 3386 - DNA, 22 bp, Artificial Sequence
  Description of Artificial Sequence: Synthetic oligonucleotide
tataaaggtgattcaatttgga

SEQ ID NO: 3387 - DNA, 22 bp, Artificial Sequence
  Description of Artificial Sequence: Synthetic oligonucleotide
tttgatccaatgctacactggt

SEQ ID NO: 3388 - DNA, 22 bp, Artificial Sequence
  Description of Artificial Sequence: Synthetic oligonucleotide
tttctcagaatgagatactgcc

SEQ ID NO: 3389 - DNA, 22 bp, Artificial Sequence
  Description of Artificial Sequence: Synthetic oligonucleotide
aataaagtgaacattcagagga

SEQ ID NO: 3390 - DNA, 22 bp, Artificial Sequence
  Description of Artificial Sequence: Synthetic oligonucleotide
ctcaatgattgaacagtgaggt

SEQ ID NO: 3391 - DNA, 22 bp, Artificial Sequence
  Description of Artificial Sequence: Synthetic oligonucleotide
tttcggaaccatcgggaatggc

SEQ ID NO: 3392 - DNA, 22 bp, Artificial Sequence
  Description of Artificial Sequence: Synthetic oligonucleotide
tattcaaacagctctatgccgt

SEQ ID NO: 3393 - DNA, 22 bp, Artificial Sequence
  Description of Artificial Sequence: Synthetic oligonucleotide
taggatcttcatagccacaggt

SEQ ID NO: 3394 - DNA, 22 bp, Artificial Sequence
  Description of Artificial Sequence: Synthetic oligonucleotide
attagcaagttcactgaagcgt

SEQ ID NO: 3395 - DNA, 22 bp, Artificial Sequence
  Description of Artificial Sequence: Synthetic oligonucleotide
atttgtcatcagggttaaacct

SEQ ID NO: 3396 - DNA, 22 bp, Artificial Sequence
  Description of Artificial Sequence: Synthetic oligonucleotide
ttacttcaaagcctgctatcct

SEQ ID NO: 3397 - DNA, 22 bp, Artificial Sequence
  Description of Artificial Sequence: Synthetic oligonucleotide
tttgttatgccgaacaattgga

SEQ ID NO: 3398 - DNA, 22 bp, Artificial Sequence
  Description of Artificial Sequence: Synthetic oligonucleotide
atactgcagaagttgctgggcc

SEQ ID NO: 3399 - DNA, 22 bp, Artificial Sequence
  Description of Artificial Sequence: Synthetic oligonucleotide
tatggttatacaaattctgcgt

SEQ ID NO: 3400 - DNA, 22 bp, Artificial Sequence
  Description of Artificial Sequence: Synthetic oligonucleotide
atacctagcgacgtggagaggc

SEQ ID NO: 3401 - DNA, 22 bp, Artificial Sequence
  Description of Artificial Sequence: Synthetic oligonucleotide
tttggactgaaggatgtgtgcc

SEQ ID NO: 3402 - DNA, 22 bp, Artificial Sequence
  Description of Artificial Sequence: Synthetic oligonucleotide
aatagacaatagtttcctgggc

SEQ ID NO: 3403 - DNA, 22 bp, Artificial Sequence
  Description of Artificial Sequence: Synthetic oligonucleotide
atttcattacattccacatgct

SEQ ID NO: 3404 - DNA, 22 bp, Artificial Sequence
  Description of Artificial Sequence: Synthetic oligonucleotide
aacaggttataaataaactggt

SEQ ID NO: 3405 - DNA, 22 bp, Artificial Sequence
  Description of Artificial Sequence: Synthetic oligonucleotide
atctctgcccatcaaatatggg

SEQ ID NO: 3406 - DNA, 22 bp, Artificial Sequence
  Description of Artificial Sequence: Synthetic oligonucleotide
ttcaaacatgtttatattggcc

SEQ ID NO: 3407 - DNA, 22 bp, Artificial Sequence
  Description of Artificial Sequence: Synthetic oligonucleotide
taagggaaacaaatttgcaggg

SEQ ID NO: 3408 - DNA, 22 bp, Artificial Sequence
  Description of Artificial Sequence: Synthetic oligonucleotide
ttattggcccaatttgtcaccc

SEQ ID NO: 3409 - DNA, 22 bp, Artificial Sequence
  Description of Artificial Sequence: Synthetic oligonucleotide
tttctctacaagtcagaaacgg

SEQ ID NO: 3410 - DNA, 22 bp, Artificial Sequence
  Description of Artificial Sequence: Synthetic oligonucleotide
ttaaaggattaagtacataggt

SEQ ID NO: 3411 - DNA, 22 bp, Artificial Sequence
  Description of Artificial Sequence: Synthetic oligonucleotide
aagcagctgcagggccagtggc

SEQ ID NO: 3412 - DNA, 22 bp, Artificial Sequence
  Description of Artificial Sequence: Synthetic oligonucleotide
ttaatactcctgcaatgggcgt

SEQ ID NO: 3413 - DNA, 22 bp, Artificial Sequence
  Description of Artificial Sequence: Synthetic oligonucleotide
ttgtgtttgcacggcagctgca

SEQ ID NO: 3414 - DNA, 22 bp, Artificial Sequence
  Description of Artificial Sequence: Synthetic oligonucleotide
tacaccctgtagaaatcctggt

SEQ ID NO: 3415 - DNA, 22 bp, Artificial Sequence
  Description of Artificial Sequence: Synthetic oligonucleotide
ttcttaataccgtcaaacagga

SEQ ID NO: 3416 - DNA, 22 bp, Artificial Sequence
  Description of Artificial Sequence: Synthetic oligonucleotide
ataaatattcagttgtggagga

SEQ ID NO: 3417 - DNA, 22 bp, Artificial Sequence
  Description of Artificial Sequence: Synthetic oligonucleotide
tttaggacagactattagcgga

SEQ ID NO: 3418 - DNA, 22 bp, Artificial Sequence
  Description of Artificial Sequence: Synthetic oligonucleotide
taatccttggttaggctgtggc

SEQ ID NO: 3419 - DNA, 22 bp, Artificial Sequence
  Description of Artificial Sequence: Synthetic oligonucleotide
ttctactctcacctattaccca

SEQ ID NO: 3420 - DNA, 22 bp, Artificial Sequence
  Description of Artificial Sequence: Synthetic oligonucleotide
aatgtacagatggttgacagct

SEQ ID NO: 3421 - DNA, 22 bp, Artificial Sequence
  Description of Artificial Sequence: Synthetic oligonucleotide
ttctctccataatagatctggg

SEQ ID NO: 3422 - DNA, 22 bp, Artificial Sequence
  Description of Artificial Sequence: Synthetic oligonucleotide
tttcatctagttagcctttggg

SEQ ID NO: 3423 - DNA, 22 bp, Artificial Sequence
  Description of Artificial Sequence: Synthetic oligonucleotide
taagttcatcttcttcatccgc

SEQ ID NO: 3424 - DNA, 22 bp, Artificial Sequence
  Description of Artificial Sequence: Synthetic oligonucleotide
atagttgctcagcaagttccct

SEQ ID NO: 3425 - DNA, 22 bp, Artificial Sequence
  Description of Artificial Sequence: Synthetic oligonucleotide
atatgtaaagggctgcttgccg

SEQ ID NO: 3426 - DNA, 22 bp, Artificial Sequence
  Description of Artificial Sequence: Synthetic oligonucleotide
tattagaacaggactcgttcgc

SEQ ID NO: 3427 - DNA, 22 bp, Artificial Sequence
  Description of Artificial Sequence: Synthetic oligonucleotide
tattagcatcacagtctagcct

SEQ ID NO: 3428 - DNA, 22 bp, Artificial Sequence
  Description of Artificial Sequence: Synthetic oligonucleotide
tttaaacttcagttactgtgca

SEQ ID NO: 3429 - DNA, 22 bp, Artificial Sequence
  Description of Artificial Sequence: Synthetic oligonucleotide
aactattaacacccaagttcct

SEQ ID NO: 3430 - DNA, 22 bp, Artificial Sequence
  Description of Artificial Sequence: Synthetic oligonucleotide
attgttgatcacctgctctggg

SEQ ID NO: 3431 - DNA, 22 bp, Artificial Sequence
  Description of Artificial Sequence: Synthetic oligonucleotide
ttcatcagggccatgatcagca

SEQ ID NO: 3432 - DNA, 22 bp, Artificial Sequence
  Description of Artificial Sequence: Synthetic oligonucleotide
atatcactcccttcaatgtgcc

SEQ ID NO: 3433 - DNA, 22 bp, Artificial Sequence
  Description of Artificial Sequence: Synthetic oligonucleotide
atatcaaacaaatggaatcgga

SEQ ID NO: 3434 - DNA, 22 bp, Artificial Sequence
  Description of Artificial Sequence: Synthetic oligonucleotide
tttcataatgatgtcctctcgc

SEQ ID NO: 3435 - DNA, 22 bp, Artificial Sequence
  Description of Artificial Sequence: Synthetic oligonucleotide
atgcttaagaggttaggaagct

SEQ ID NO: 3436 - DNA, 22 bp, Artificial Sequence
  Description of Artificial Sequence: Synthetic oligonucleotide
tagaggatcacaaacatgagct

SEQ ID NO: 3437 - DNA, 22 bp, Artificial Sequence
  Description of Artificial Sequence: Synthetic oligonucleotide
ataaacagcaggaaacagaggt

SEQ ID NO: 3438 - DNA, 22 bp, Artificial Sequence
  Description of Artificial Sequence: Synthetic oligonucleotide
tttggaaaggactttcattgca

SEQ ID NO: 3439 - DNA, 22 bp, Artificial Sequence
  Description of Artificial Sequence: Synthetic oligonucleotide
atgacgtcccgcaggtagaggc

SEQ ID NO: 3440 - DNA, 22 bp, Artificial Sequence
  Description of Artificial Sequence: Synthetic oligonucleotide
ttcttgtctaacatcttcagga

SEQ ID NO: 3441 - DNA, 22 bp, Artificial Sequence
  Description of Artificial Sequence: Synthetic oligonucleotide
aagacgtgcagcaggccctggt

SEQ ID NO: 3442 - DNA, 22 bp, Artificial Sequence
  Description of Artificial Sequence: Synthetic oligonucleotide
tattatcaggtaatttccagga

SEQ ID NO: 3443 - DNA, 22 bp, Artificial Sequence
  Description of Artificial Sequence: Synthetic oligonucleotide
tttacttgctttattatcaggt

SEQ ID NO: 3444 - DNA, 22 bp, Artificial Sequence
  Description of Artificial Sequence: Synthetic oligonucleotide
ttcttaagtcaagttactaccc

SEQ ID NO: 3445 - DNA, 22 bp, Artificial Sequence
  Description of Artificial Sequence: Synthetic oligonucleotide
ttcctcaagacgggtagtgcca

SEQ ID NO: 3446 - DNA, 22 bp, Artificial Sequence
  Description of Artificial Sequence: Synthetic oligonucleotide
ttgtgccaaggattatagtccc

SEQ ID NO: 3447 - DNA, 22 bp, Artificial Sequence
  Description of Artificial Sequence: Synthetic oligonucleotide
ttcttctacaagagccagtggc

SEQ ID NO: 3448 - DNA, 22 bp, Artificial Sequence
  Description of Artificial Sequence: Synthetic oligonucleotide
atttctccaggagatgagtggg

SEQ ID NO: 3449 - DNA, 22 bp, Artificial Sequence
  Description of Artificial Sequence: Synthetic oligonucleotide
taacaagttctttaattctccc

SEQ ID NO: 3450 - DNA, 22 bp, Artificial Sequence
  Description of Artificial Sequence: Synthetic oligonucleotide
tttgacagagccagtaggtccc

SEQ ID NO: 3451 - DNA, 22 bp, Artificial Sequence
  Description of Artificial Sequence: Synthetic oligonucleotide
ataacgaggaacagcgtccggc

SEQ ID NO: 3452 - DNA, 22 bp, Artificial Sequence
  Description of Artificial Sequence: Synthetic oligonucleotide
ataagaatcattcttaaagcca

SEQ ID NO: 3453 - DNA, 22 bp, Artificial Sequence
  Description of Artificial Sequence: Synthetic oligonucleotide
tatggtttgaatgaataaggct

SEQ ID NO: 3454 - DNA, 22 bp, Artificial Sequence
  Description of Artificial Sequence: Synthetic oligonucleotide
tttgcctttctggtgccctggc

SEQ ID NO: 3455 - DNA, 22 bp, Artificial Sequence
  Description of Artificial Sequence: Synthetic oligonucleotide
taaacaaacaatcctcattgct

SEQ ID NO: 3456 - DNA, 22 bp, Artificial Sequence
  Description of Artificial Sequence: Synthetic oligonucleotide
aatatggatcacttgttcaggg

SEQ ID NO: 3457 - DNA, 22 bp, Artificial Sequence
  Description of Artificial Sequence: Synthetic oligonucleotide
ttagattgcaactatggatcgc

SEQ ID NO: 3458 - DNA, 22 bp, Artificial Sequence
  Description of Artificial Sequence: Synthetic oligonucleotide
atttcactgaggcaaaccaggg

SEQ ID NO: 3459 - DNA, 22 bp, Artificial Sequence
  Description of Artificial Sequence: Synthetic oligonucleotide
tattccaatgaagctgctgcct

SEQ ID NO: 3460 - DNA, 22 bp, Artificial Sequence
  Description of Artificial Sequence: Synthetic oligonucleotide
aattccaccaagcaactgcggc

SEQ ID NO: 3461 - DNA, 22 bp, Artificial Sequence
  Description of Artificial Sequence: Synthetic oligonucleotide
aatccattagaacctgtgtgca

SEQ ID NO: 3462 - DNA, 22 bp, Artificial Sequence
  Description of Artificial Sequence: Synthetic oligonucleotide
taaggcatcttcagacacagcg

SEQ ID NO: 3463 - DNA, 22 bp, Artificial Sequence
  Description of Artificial Sequence: Synthetic oligonucleotide
tttacgcaagaaacaaggaggc

SEQ ID NO: 3464 - DNA, 22 bp, Artificial Sequence
  Description of Artificial Sequence: Synthetic oligonucleotide
aagtcacatgtgatcttgtcct

SEQ ID NO: 3465 - DNA, 22 bp, Artificial Sequence
  Description of Artificial Sequence: Synthetic oligonucleotide
ttatcgtggaggcccaggcggc

SEQ ID NO: 3466 - DNA, 22 bp, Artificial Sequence
  Description of Artificial Sequence: Synthetic oligonucleotide
aataataacgggaggaggaggg

SEQ ID NO: 3467 - DNA, 22 bp, Artificial Sequence
  Description of Artificial Sequence: Synthetic oligonucleotide
ttaaataataacgggaggagga

SEQ ID NO: 3468 - DNA, 22 bp, Artificial Sequence
  Description of Artificial Sequence: Synthetic oligonucleotide
tttaatgctagggtggaaaggt

SEQ ID NO: 3469 - DNA, 22 bp, Artificial Sequence
  Description of Artificial Sequence: Synthetic oligonucleotide
aatttctcaggagccgtgtcga

SEQ ID NO: 3470 - DNA, 22 bp, Artificial Sequence
  Description of Artificial Sequence: Synthetic oligonucleotide
ttgtctccagaacttcatagcg

SEQ ID NO: 3471 - DNA, 22 bp, Artificial Sequence
  Description of Artificial Sequence: Synthetic oligonucleotide
aaggaattggatttcctcaggg

SEQ ID NO: 3472 - DNA, 22 bp, Artificial Sequence
  Description of Artificial Sequence: Synthetic oligonucleotide
attgtcagtaacgtacagtgct

SEQ ID NO: 3473 - DNA, 22 bp, Artificial Sequence
  Description of Artificial Sequence: Synthetic oligonucleotide
tactgcatgcgggtctcgcggt

SEQ ID NO: 3474 - DNA, 22 bp, Artificial Sequence
  Description of Artificial Sequence: Synthetic oligonucleotide
atatgattgaatttcatggcgt

SEQ ID NO: 3475 - DNA, 22 bp, Artificial Sequence
  Description of Artificial Sequence: Synthetic oligonucleotide
aatactgaaccaaattgctggg

SEQ ID NO: 3476 - DNA, 22 bp, Artificial Sequence
  Description of Artificial Sequence: Synthetic oligonucleotide
tagatatatgcatttaggtgtg

SEQ ID NO: 3477 - DNA, 22 bp, Artificial Sequence
  Description of Artificial Sequence: Synthetic oligonucleotide
tatagatatatgcatttaggtg

SEQ ID NO: 3478 - DNA, 22 bp, Artificial Sequence
  Description of Artificial Sequence: Synthetic oligonucleotide
atatagatatatgcatttaggt

SEQ ID NO: 3479 - DNA, 22 bp, Artificial Sequence
  Description of Artificial Sequence: Synthetic oligonucleotide
atgatcttggagtcagtgcccg

SEQ ID NO: 3480 - DNA, 22 bp, Artificial Sequence
  Description of Artificial Sequence: Synthetic oligonucleotide
ataaataactgcacattctcca

SEQ ID NO: 3481 - DNA, 22 bp, Artificial Sequence
  Description of Artificial Sequence: Synthetic oligonucleotide
atatttcgggagtctcaaaggc

SEQ ID NO: 3482 - DNA, 22 bp, Artificial Sequence
  Description of Artificial Sequence: Synthetic oligonucleotide
ttaatctcttaatggtacaggt

SEQ ID NO: 3483 - DNA, 22 bp, Artificial Sequence
  Description of Artificial Sequence: Synthetic oligonucleotide
atgacatatacagaaatgtcgt

SEQ ID NO: 3484 - DNA, 22 bp, Artificial Sequence
  Description of Artificial Sequence: Synthetic oligonucleotide
taagaggtagcaagactgggcc

SEQ ID NO: 3485 - DNA, 22 bp, Artificial Sequence
  Description of Artificial Sequence: Synthetic oligonucleotide
ataaatcagtcacttccaggct

SEQ ID NO: 3486 - DNA, 22 bp, Artificial Sequence
  Description of Artificial Sequence: Synthetic oligonucleotide
taacattgtcataatcggccct

SEQ ID NO: 3487 - DNA, 22 bp, Artificial Sequence
  Description of Artificial Sequence: Synthetic oligonucleotide
atcaccaaagatgtaaactcct

SEQ ID NO: 3488 - DNA, 22 bp, Artificial Sequence
  Description of Artificial Sequence: Synthetic oligonucleotide
atatgccttgactcactctggc

SEQ ID NO: 3489 - DNA, 22 bp, Artificial Sequence
  Description of Artificial Sequence: Synthetic oligonucleotide
ttgatataagaggaaacctgac

SEQ ID NO: 3490 - DNA, 22 bp, Artificial Sequence
  Description of Artificial Sequence: Synthetic oligonucleotide
tttagctctggtgtgcggtggg

SEQ ID NO: 3491 - DNA, 22 bp, Artificial Sequence
  Description of Artificial Sequence: Synthetic oligonucleotide
tataagtgcaccttcatttcct

SEQ ID NO: 3492 - DNA, 22 bp, Artificial Sequence
  Description of Artificial Sequence: Synthetic oligonucleotide
taatgataaggtgaatgcaggg

SEQ ID NO: 3493 - DNA, 22 bp, Artificial Sequence
  Description of Artificial Sequence: Synthetic oligonucleotide
ataatctgaggaaattccagct

SEQ ID NO: 3494 - DNA, 22 bp, Artificial Sequence
  Description of Artificial Sequence: Synthetic oligonucleotide
ttatcttccttcagaatgtcct

SEQ ID NO: 3495 - DNA, 22 bp, Artificial Sequence
  Description of Artificial Sequence: Synthetic oligonucleotide
aattcatctatgatgctctcct

SEQ ID NO: 3496 - DNA, 22 bp, Artificial Sequence
  Description of Artificial Sequence: Synthetic oligonucleotide
ataagcttgcacaaggagcgca

SEQ ID NO: 3497 - DNA, 22 bp, Artificial Sequence
  Description of Artificial Sequence: Synthetic oligonucleotide
ttaggatttcatcctgtgggcc

SEQ ID NO: 3498 - DNA, 22 bp, Artificial Sequence
  Description of Artificial Sequence: Synthetic oligonucleotide
aatacaactcagggaaagaggg

SEQ ID NO: 3499 - DNA, 22 bp, Artificial Sequence
  Description of Artificial Sequence: Synthetic oligonucleotide
atttgatccaacaaagaaaggc

SEQ ID NO: 3500 - DNA, 22 bp, Artificial Sequence
  Description of Artificial Sequence: Synthetic oligonucleotide
atgcataaacatataagtccct

SEQ ID NO: 3501 - DNA, 22 bp, Artificial Sequence
  Description of Artificial Sequence: Synthetic oligonucleotide
ttatcataagtgatgtaaaggt

SEQ ID NO: 3502 - DNA, 22 bp, Artificial Sequence
  Description of Artificial Sequence: Synthetic oligonucleotide
aagaagatacatatgaactcca

SEQ ID NO: 3503 - DNA, 22 bp, Artificial Sequence
  Description of Artificial Sequence: Synthetic oligonucleotide
atgaggcaggagagggaaagca

SEQ ID NO: 3504 - DNA, 22 bp, Artificial Sequence
  Description of Artificial Sequence: Synthetic oligonucleotide
ataatgtccatgaaacacagcc

SEQ ID NO: 3505 - DNA, 22 bp, Artificial Sequence
  Description of Artificial Sequence: Synthetic oligonucleotide
taaatccagcattgtgttaggt

SEQ ID NO: 3506 - DNA, 22 bp, Artificial Sequence
  Description of Artificial Sequence: Synthetic oligonucleotide
tttaacaatcagtagagggccc

SEQ ID NO: 3507 - DNA, 22 bp, Artificial Sequence
  Description of Artificial Sequence: Synthetic oligonucleotide
tatattggttgtagaactgcct

SEQ ID NO: 3508 - DNA, 22 bp, Artificial Sequence
  Description of Artificial Sequence: Synthetic oligonucleotide
atcctacgacgtgctgctgggc

SEQ ID NO: 3509 - DNA, 22 bp, Artificial Sequence
  Description of Artificial Sequence: Synthetic oligonucleotide
atcttcttcatcatggaatggg

SEQ ID NO: 3510 - DNA, 22 bp, Artificial Sequence
  Description of Artificial Sequence: Synthetic oligonucleotide
ttataagattcctcagtcagat

SEQ ID NO: 3511 - DNA, 22 bp, Artificial Sequence
  Description of Artificial Sequence: Synthetic oligonucleotide
ataactgttctccttctgggcc

SEQ ID NO: 3512 - DNA, 22 bp, Artificial Sequence
  Description of Artificial Sequence: Synthetic oligonucleotide
tatcctgcagcagcaccagggc

SEQ ID NO: 3513 - DNA, 22 bp, Artificial Sequence
  Description of Artificial Sequence: Synthetic oligonucleotide
atatttattcactctcactcgc

SEQ ID NO: 3514 - DNA, 22 bp, Artificial Sequence
  Description of Artificial Sequence: Synthetic oligonucleotide
ttaggatttgaaatgtatggct

SEQ ID NO: 3515 - DNA, 22 bp, Artificial Sequence
  Description of Artificial Sequence: Synthetic oligonucleotide
tttgtcgttgctactctgtcct

SEQ ID NO: 3516 - DNA, 22 bp, Artificial Sequence
  Description of Artificial Sequence: Synthetic oligonucleotide
aatatgctccactgcaggagct

SEQ ID NO: 3517 - DNA, 22 bp, Artificial Sequence
  Description of Artificial Sequence: Synthetic oligonucleotide
taatagccacaatttccttggt

SEQ ID NO: 3518 - DNA, 22 bp, Artificial Sequence
  Description of Artificial Sequence: Synthetic oligonucleotide
tttaactgtaggatcagctccg

SEQ ID NO: 3519 - DNA, 22 bp, Artificial Sequence
  Description of Artificial Sequence: Synthetic oligonucleotide
atgttctgcagcttactcagca

SEQ ID NO: 3520 - DNA, 22 bp, Artificial Sequence
  Description of Artificial Sequence: Synthetic oligonucleotide
atactgtatgtcatctccaggt

SEQ ID NO: 3521 - DNA, 22 bp, Artificial Sequence
  Description of Artificial Sequence: Synthetic oligonucleotide
tttacccaggaggtgggcaggg

SEQ ID NO: 3522 - DNA, 22 bp, Artificial Sequence
  Description of Artificial Sequence: Synthetic oligonucleotide
attctctcgcccatcggttggc

SEQ ID NO: 3523 - DNA, 22 bp, Artificial Sequence
  Description of Artificial Sequence: Synthetic oligonucleotide
ttgttccatgaatgcagcagct

SEQ ID NO: 3524 - DNA, 22 bp, Artificial Sequence
  Description of Artificial Sequence: Synthetic oligonucleotide
tttcatagccacggcactggcc

SEQ ID NO: 3525 - DNA, 22 bp, Artificial Sequence
  Description of Artificial Sequence: Synthetic oligonucleotide
atacagaataaatacctgcgcc

SEQ ID NO: 3526 - DNA, 22 bp, Artificial Sequence
  Description of Artificial Sequence: Synthetic oligonucleotide
aatcgctatgcctgcgctggcg

SEQ ID NO: 3527 - DNA, 22 bp, Artificial Sequence
  Description of Artificial Sequence: Synthetic oligonucleotide
aactcttggcattcttcgtgcc

SEQ ID NO: 3528 - DNA, 22 bp, Artificial Sequence
  Description of Artificial Sequence: Synthetic oligonucleotide
tttccctttagctaagtatgct

SEQ ID NO: 3529 - DNA, 22 bp, Artificial Sequence
  Description of Artificial Sequence: Synthetic oligonucleotide
tattccattacaataaacagcc

SEQ ID NO: 3530 - DNA, 22 bp, Artificial Sequence
  Description of Artificial Sequence: Synthetic oligonucleotide
aatggaatttatggatggtcgg

SEQ ID NO: 3531 - DNA, 22 bp, Artificial Sequence
  Description of Artificial Sequence: Synthetic oligonucleotide
tttagaatgtccattctcagta

SEQ ID NO: 3532 - DNA, 22 bp, Artificial Sequence
  Description of Artificial Sequence: Synthetic oligonucleotide
tatgcataactcaccatgtgga

SEQ ID NO: 3533 - DNA, 22 bp, Artificial Sequence
  Description of Artificial Sequence: Synthetic oligonucleotide
tcatcattcattattcagaggc

SEQ ID NO: 3534 - DNA, 22 bp, Artificial Sequence
  Description of Artificial Sequence: Synthetic oligonucleotide
ctagaatcactggttcttggca

SEQ ID NO: 3535 - DNA, 22 bp, Artificial Sequence
  Description of Artificial Sequence: Synthetic oligonucleotide
tttaaacttctgactacgaccc

SEQ ID NO: 3536 - DNA, 22 bp, Artificial Sequence
  Description of Artificial Sequence: Synthetic oligonucleotide
atttaccatgaatgaaagggct

SEQ ID NO: 3537 - DNA, 22 bp, Artificial Sequence
  Description of Artificial Sequence: Synthetic oligonucleotide
aagagtatccaaagttaagcct

SEQ ID NO: 3538 - DNA, 22 bp, Artificial Sequence
  Description of Artificial Sequence: Synthetic oligonucleotide
tttaatttgggagttaaatggg

SEQ ID NO: 3539 - DNA, 22 bp, Artificial Sequence
  Description of Artificial Sequence: Synthetic oligonucleotide
tatgaatctgggtatgtgtgct

SEQ ID NO: 3540 - DNA, 22 bp, Artificial Sequence
  Description of Artificial Sequence: Synthetic oligonucleotide
tttggcattgatatctgctcca

SEQ ID NO: 3541 - DNA, 22 bp, Artificial Sequence
  Description of Artificial Sequence: Synthetic oligonucleotide
ttaaaccaggaataacacagct

SEQ ID NO: 3542 - DNA, 22 bp, Artificial Sequence
  Description of Artificial Sequence: Synthetic oligonucleotide
ttgttgattattaccaagaggt

SEQ ID NO: 3543 - DNA, 22 bp, Artificial Sequence
  Description of Artificial Sequence: Synthetic oligonucleotide
atagatgagggagatgagggac

SEQ ID NO: 3544 - DNA, 22 bp, Artificial Sequence
  Description of Artificial Sequence: Synthetic oligonucleotide
taatagatgagggagatgaggg

SEQ ID NO: 3545 - DNA, 22 bp, Artificial Sequence
  Description of Artificial Sequence: Synthetic oligonucleotide
atttaacataactagtatgttg

SEQ ID NO: 3546 - DNA, 22 bp, Artificial Sequence
  Description of Artificial Sequence: Synthetic oligonucleotide
ttatatatatgtgtatactgat

SEQ ID NO: 3547 - DNA, 22 bp, Artificial Sequence
  Description of Artificial Sequence: Synthetic oligonucleotide
atgtttctgcagagtttcagga

SEQ ID NO: 3548 - DNA, 22 bp, Artificial Sequence
  Description of Artificial Sequence: Synthetic oligonucleotide
ttaggatgtaataattcaacgc

SEQ ID NO: 3549 - DNA, 22 bp, Artificial Sequence
  Description of Artificial Sequence: Synthetic oligonucleotide
taagttgagggcattatagtaa

SEQ ID NO: 3550 - DNA, 22 bp, Artificial Sequence
  Description of Artificial Sequence: Synthetic oligonucleotide
tatttacggtaaactgtgtcac

SEQ ID NO: 3551 - DNA, 22 bp, Artificial Sequence
  Description of Artificial Sequence: Synthetic oligonucleotide
tctaataagaatgcagagggta

SEQ ID NO: 3552 - DNA, 22 bp, Artificial Sequence
  Description of Artificial Sequence: Synthetic oligonucleotide
ttctgaaaggatcaaatgtcta

SEQ ID NO: 3553 - DNA, 22 bp, Artificial Sequence
  Description of Artificial Sequence: Synthetic oligonucleotide
tatcagctgagtagaatcaggc

SEQ ID NO: 3554 - DNA, 22 bp, Artificial Sequence
  Description of Artificial Sequence: Synthetic oligonucleotide
ttaatctctccctttccttcct

SEQ ID NO: 3555 - DNA, 22 bp, Artificial Sequence
  Description of Artificial Sequence: Synthetic oligonucleotide
atttgaatccacagaaggagga

SEQ ID NO: 3556 - DNA, 22 bp, Artificial Sequence
  Description of Artificial Sequence: Synthetic oligonucleotide
tttctgtttgatgtagtctggt

SEQ ID NO: 3557 - DNA, 22 bp, Artificial Sequence
  Description of Artificial Sequence: Synthetic oligonucleotide
ataaactaccacttatactggt

SEQ ID NO: 3558 - DNA, 22 bp, Artificial Sequence
  Description of Artificial Sequence: Synthetic oligonucleotide
tttgctcttggaggaatttcca

SEQ ID NO: 3559 - DNA, 22 bp, Artificial Sequence
  Description of Artificial Sequence: Synthetic oligonucleotide
ttctggatacagggtatttggt

SEQ ID NO: 3560 - DNA, 22 bp, Artificial Sequence
  Description of Artificial Sequence: Synthetic oligonucleotide
aattcggaccagatagagggct

SEQ ID NO: 3561 - DNA, 22 bp, Artificial Sequence
  Description of Artificial Sequence: Synthetic oligonucleotide
atttcagtgcagattaaatccc

SEQ ID NO: 3562 - DNA, 22 bp, Artificial Sequence
  Description of Artificial Sequence: Synthetic oligonucleotide
ttaatcatcatctggaaatcgt

SEQ ID NO: 3563 - DNA, 22 bp, Artificial Sequence
  Description of Artificial Sequence: Synthetic oligonucleotide
ttacatctattcacagtacggc

SEQ ID NO: 3564 - DNA, 22 bp, Artificial Sequence
  Description of Artificial Sequence: Synthetic oligonucleotide
tttgcctcggtaattctgcgct

SEQ ID NO: 3565 - DNA, 22 bp, Artificial Sequence
  Description of Artificial Sequence: Synthetic oligonucleotide
ttaaatcctccaaacatgtgcg

SEQ ID NO: 3566 - DNA, 22 bp, Artificial Sequence
  Description of Artificial Sequence: Synthetic oligonucleotide
taaatcctccaaacatgtgcgg

SEQ ID NO: 3567 - DNA, 22 bp, Artificial Sequence
  Description of Artificial Sequence: Synthetic oligonucleotide
tatgcatagacaaggcagtcgt

SEQ ID NO: 3568 - DNA, 22 bp, Artificial Sequence
  Description of Artificial Sequence: Synthetic oligonucleotide
ttatacttcatcctcgcctctc

SEQ ID NO: 3569 - DNA, 22 bp, Artificial Sequence
  Description of Artificial Sequence: Synthetic oligonucleotide
ttctagaagtgcaatcttggca

SEQ ID NO: 3570 - DNA, 22 bp, Artificial Sequence
  Description of Artificial Sequence: Synthetic oligonucleotide
tttgtgttgcaactcagtagct

SEQ ID NO: 3571 - DNA, 22 bp, Artificial Sequence
  Description of Artificial Sequence: Synthetic oligonucleotide
tttctgtgtttctgttacacgt

SEQ ID NO: 3572 - DNA, 22 bp, Artificial Sequence
  Description of Artificial Sequence: Synthetic oligonucleotide
aatttgattagattatagagtc

SEQ ID NO: 3573 - DNA, 22 bp, Artificial Sequence
  Description of Artificial Sequence: Synthetic oligonucleotide
taacttgttaagatcagctggc

SEQ ID NO: 3574 - DNA, 22 bp, Artificial Sequence
  Description of Artificial Sequence: Synthetic oligonucleotide
ttcttacaaagctgctgaaggt

SEQ ID NO: 3575 - DNA, 22 bp, Artificial Sequence
  Description of Artificial Sequence: Synthetic oligonucleotide
taactacataaacagcagaggt

SEQ ID NO: 3576 - DNA, 22 bp, Artificial Sequence
  Description of Artificial Sequence: Synthetic oligonucleotide
atggtattcgacgagtcctggc

SEQ ID NO: 3577 - DNA, 22 bp, Artificial Sequence
  Description of Artificial Sequence: Synthetic oligonucleotide
tatagctatgactgtaacaccc

SEQ ID NO: 3578 - DNA, 22 bp, Artificial Sequence
  Description of Artificial Sequence: Synthetic oligonucleotide
taaggataccaaggtactagct

SEQ ID NO: 3579 - DNA, 22 bp, Artificial Sequence
  Description of Artificial Sequence: Synthetic oligonucleotide
ttatccatgtctgttaagtctt

SEQ ID NO: 3580 - DNA, 22 bp, Artificial Sequence
  Description of Artificial Sequence: Synthetic oligonucleotide
tattaatggtccacatatagga

SEQ ID NO: 3581 - DNA, 22 bp, Artificial Sequence
  Description of Artificial Sequence: Synthetic oligonucleotide
atgagatctaatacaacaccca

SEQ ID NO: 3582 - DNA, 22 bp, Artificial Sequence
  Description of Artificial Sequence: Synthetic oligonucleotide
tttctaaggccaactgggtgca

SEQ ID NO: 3583 - DNA, 22 bp, Artificial Sequence
  Description of Artificial Sequence: Synthetic oligonucleotide
taatcctgggaagttgtcccgt

SEQ ID NO: 3584 - DNA, 22 bp, Artificial Sequence
  Description of Artificial Sequence: Synthetic oligonucleotide
tataagttgaacatacatggca

SEQ ID NO: 3585 - DNA, 22 bp, Artificial Sequence
  Description of Artificial Sequence: Synthetic oligonucleotide
taaccatttattccaaggaggc

SEQ ID NO: 3586 - DNA, 22 bp, Artificial Sequence
  Description of Artificial Sequence: Synthetic oligonucleotide
tatttctagtcagacatctcca

SEQ ID NO: 3587 - DNA, 22 bp, Artificial Sequence
  Description of Artificial Sequence: Synthetic oligonucleotide
taatgacagagaaagcacacca

SEQ ID NO: 3588 - DNA, 22 bp, Artificial Sequence
  Description of Artificial Sequence: Synthetic oligonucleotide
ttattaaactgaatcacctggc

SEQ ID NO: 3589 - DNA, 22 bp, Artificial Sequence
  Description of Artificial Sequence: Synthetic oligonucleotide
atacagtgtacagtttactggt

SEQ ID NO: 3590 - DNA, 22 bp, Artificial Sequence
  Description of Artificial Sequence: Synthetic oligonucleotide
taattcaaagaagtgtgggcct

SEQ ID NO: 3591 - DNA, 22 bp, Artificial Sequence
  Description of Artificial Sequence: Synthetic oligonucleotide
taagtaattcacagcacaacct

SEQ ID NO: 3592 - DNA, 22 bp, Artificial Sequence
  Description of Artificial Sequence: Synthetic oligonucleotide
ttgaacaaacagctctagggca

SEQ ID NO: 3593 - DNA, 22 bp, Artificial Sequence
  Description of Artificial Sequence: Synthetic oligonucleotide
ataaatatgacaggtgtcaggg

SEQ ID NO: 3594 - DNA, 22 bp, Artificial Sequence
  Description of Artificial Sequence: Synthetic oligonucleotide
ttcaccttcatttccagcacgg

SEQ ID NO: 3595 - DNA, 22 bp, Artificial Sequence
  Description of Artificial Sequence: Synthetic oligonucleotide
tttaaggaaagggagaagtgca

SEQ ID NO: 3596 - DNA, 22 bp, Artificial Sequence
  Description of Artificial Sequence: Synthetic oligonucleotide
atttaacatccttgtttctgct

SEQ ID NO: 3597 - DNA, 22 bp, Artificial Sequence
  Description of Artificial Sequence: Synthetic oligonucleotide
atcatcaataagaacaactgca

SEQ ID NO: 3598 - DNA, 22 bp, Artificial Sequence
  Description of Artificial Sequence: Synthetic oligonucleotide
ttcacattgctaagatgcaggt

SEQ ID NO: 3599 - DNA, 22 bp, Artificial Sequence
  Description of Artificial Sequence: Synthetic oligonucleotide
atattcacattgctaagatgca

SEQ ID NO: 3600 - DNA, 22 bp, Artificial Sequence
  Description of Artificial Sequence: Synthetic oligonucleotide
tattcacattgctaagatgcag

SEQ ID NO: 3601 - DNA, 22 bp, Artificial Sequence
  Description of Artificial Sequence: Synthetic oligonucleotide
atctcttcaaatatagctccct

SEQ ID NO: 3602 - DNA, 22 bp, Artificial Sequence
  Description of Artificial Sequence: Synthetic oligonucleotide
tttctgttacgtcaagtctggg

SEQ ID NO: 3603 - DNA, 22 bp, Artificial Sequence
  Description of Artificial Sequence: Synthetic oligonucleotide
tttctctaactctttgtctggc

SEQ ID NO: 3604 - DNA, 22 bp, Artificial Sequence
  Description of Artificial Sequence: Synthetic oligonucleotide
tataaagggaagatcagaagcc

SEQ ID NO: 3605 - DNA, 22 bp, Artificial Sequence
  Description of Artificial Sequence: Synthetic oligonucleotide
attccatgtaagagtaaaggca

SEQ ID NO: 3606 - DNA, 22 bp, Artificial Sequence
  Description of Artificial Sequence: Synthetic oligonucleotide
aatattcaacatgttgagcgca

SEQ ID NO: 3607 - DNA, 22 bp, Artificial Sequence
  Description of Artificial Sequence: Synthetic oligonucleotide
tacagatctcacatgtgtacgg

SEQ ID NO: 3608 - DNA, 22 bp, Artificial Sequence
  Description of Artificial Sequence: Synthetic oligonucleotide
aagtggtggaatatagtgtgcc

SEQ ID NO: 3609 - DNA, 22 bp, Artificial Sequence
  Description of Artificial Sequence: Synthetic oligonucleotide
ttcttcttgtaaatcatgacca

SEQ ID NO: 3610 - DNA, 22 bp, Artificial Sequence
  Description of Artificial Sequence: Synthetic oligonucleotide
tattgtgcactcgtacttccgc

SEQ ID NO: 3611 - DNA, 22 bp, Artificial Sequence
  Description of Artificial Sequence: Synthetic oligonucleotide
aagttagaggaaccaatgagct

SEQ ID NO: 3612 - DNA, 22 bp, Artificial Sequence
  Description of Artificial Sequence: Synthetic oligonucleotide
tttctactggacgacttgtggg

SEQ ID NO: 3613 - DNA, 22 bp, Artificial Sequence
  Description of Artificial Sequence: Synthetic oligonucleotide
ttcatggaaaggtgcaaaggca

SEQ ID NO: 3614 - DNA, 22 bp, Artificial Sequence
  Description of Artificial Sequence: Synthetic oligonucleotide
taaatgcacaacattcgtacca

SEQ ID NO: 3615 - DNA, 22 bp, Artificial Sequence
  Description of Artificial Sequence: Synthetic oligonucleotide
ttaagtctattctttggcagct

SEQ ID NO: 3616 - DNA, 22 bp, Artificial Sequence
  Description of Artificial Sequence: Synthetic oligonucleotide
attgcatataaatctaccaggc

SEQ ID NO: 3617 - DNA, 22 bp, Artificial Sequence
  Description of Artificial Sequence: Synthetic oligonucleotide
ttcaagtattgtgcggagaggc

SEQ ID NO: 3618 - DNA, 22 bp, Artificial Sequence
  Description of Artificial Sequence: Synthetic oligonucleotide
atgaatgttcaagtattgtgcg

SEQ ID NO: 3619 - DNA, 22 bp, Artificial Sequence
  Description of Artificial Sequence: Synthetic oligonucleotide
ttccacgcagaaggagtggcag

SEQ ID NO: 3620 - DNA, 22 bp, Artificial Sequence
  Description of Artificial Sequence: Synthetic oligonucleotide
atgtagtggccgatgacatcgg

SEQ ID NO: 3621 - DNA, 22 bp, Artificial Sequence
  Description of Artificial Sequence: Synthetic oligonucleotide
tacacggagtacagggcggcgg

SEQ ID NO: 3622 - DNA, 22 bp, Artificial Sequence
  Description of Artificial Sequence: Synthetic oligonucleotide
tatacagcagagtacacaaggc

SEQ ID NO: 3623 - DNA, 22 bp, Artificial Sequence
  Description of Artificial Sequence: Synthetic oligonucleotide
taacacccgcaagaaggatgca

SEQ ID NO: 3624 - DNA, 22 bp, Artificial Sequence
  Description of Artificial Sequence: Synthetic oligonucleotide
ttgttcacacagaggctagcca

SEQ ID NO: 3625 - DNA, 22 bp, Artificial Sequence
  Description of Artificial Sequence: Synthetic oligonucleotide
ttcacagaacatcttctttgtc

SEQ ID NO: 3626 - DNA, 22 bp, Artificial Sequence
  Description of Artificial Sequence: Synthetic oligonucleotide
atttcacttgggaccatgacct

SEQ ID NO: 3627 - DNA, 22 bp, Artificial Sequence
  Description of Artificial Sequence: Synthetic oligonucleotide
atttctgcagccagtggcaggg

SEQ ID NO: 3628 - DNA, 22 bp, Artificial Sequence
  Description of Artificial Sequence: Synthetic oligonucleotide
attccttctgggtgtctgtccc

SEQ ID NO: 3629 - DNA, 22 bp, Artificial Sequence
  Description of Artificial Sequence: Synthetic oligonucleotide
aagaaaggtccagtaactccga

SEQ ID NO: 3630 - DNA, 22 bp, Artificial Sequence
  Description of Artificial Sequence: Synthetic oligonucleotide
ttctgacaaatcctcttctggg

SEQ ID NO: 3631 - DNA, 22 bp, Artificial Sequence
  Description of Artificial Sequence: Synthetic oligonucleotide
taatcctcctctgagaacacgt

SEQ ID NO: 3632 - DNA, 22 bp, Artificial Sequence
  Description of Artificial Sequence: Synthetic oligonucleotide
attctctgtgatctcaacaggt

SEQ ID NO: 3633 - DNA, 22 bp, Artificial Sequence
  Description of Artificial Sequence: Synthetic oligonucleotide
tttcaaactttgaacttcacct

SEQ ID NO: 3634 - DNA, 22 bp, Artificial Sequence
  Description of Artificial Sequence: Synthetic oligonucleotide
aagtacttggtcgcttactcct

SEQ ID NO: 3635 - DNA, 22 bp, Artificial Sequence
  Description of Artificial Sequence: Synthetic oligonucleotide
ttccagatattcaatgtcggca

SEQ ID NO: 3636 - DNA, 22 bp, Artificial Sequence
  Description of Artificial Sequence: Synthetic oligonucleotide
atacaattcaatgcacacagca

SEQ ID NO: 3637 - DNA, 22 bp, Artificial Sequence
  Description of Artificial Sequence: Synthetic oligonucleotide
ttattgagggagtcctggagca

SEQ ID NO: 3638 - DNA, 22 bp, Artificial Sequence
  Description of Artificial Sequence: Synthetic oligonucleotide
ttcagaactcttgttgagtgca

SEQ ID NO: 3639 - DNA, 22 bp, Artificial Sequence
  Description of Artificial Sequence: Synthetic oligonucleotide
ttgtgtcttagaatgatctgca

SEQ ID NO: 3640 - DNA, 22 bp, Artificial Sequence
  Description of Artificial Sequence: Synthetic oligonucleotide
aactactatttggtattcggca

SEQ ID NO: 3641 - DNA, 22 bp, Artificial Sequence
  Description of Artificial Sequence: Synthetic oligonucleotide
tttgagaaggtagaactctgcc

SEQ ID NO: 3642 - DNA, 22 bp, Artificial Sequence
  Description of Artificial Sequence: Synthetic oligonucleotide
taagttccaaccagtgtgagca

SEQ ID NO: 3643 - DNA, 22 bp, Artificial Sequence
  Description of Artificial Sequence: Synthetic oligonucleotide
tagtttgacagggttcttacca

SEQ ID NO: 3644 - DNA, 22 bp, Artificial Sequence
  Description of Artificial Sequence: Synthetic oligonucleotide
tttctccttcttccaggatgcc

SEQ ID NO: 3645 - DNA, 22 bp, Artificial Sequence
  Description of Artificial Sequence: Synthetic oligonucleotide
atcgttcctgcctcgttctggt

SEQ ID NO: 3646 - DNA, 22 bp, Artificial Sequence
  Description of Artificial Sequence: Synthetic oligonucleotide
taagctcctggtcaaagtagcc

SEQ ID NO: 3647 - DNA, 22 bp, Artificial Sequence
  Description of Artificial Sequence: Synthetic oligonucleotide
ttgtccacctccagtagtaggt

SEQ ID NO: 3648 - DNA, 22 bp, Artificial Sequence
  Description of Artificial Sequence: Synthetic oligonucleotide
ttctcagcctctgtaatgtccc

SEQ ID NO: 3649 - DNA, 22 bp, Artificial Sequence
  Description of Artificial Sequence: Synthetic oligonucleotide
ttctagagtgagatatgttggc

SEQ ID NO: 3650 - DNA, 22 bp, Artificial Sequence
  Description of Artificial Sequence: Synthetic oligonucleotide
tttgaaaccactatggcgagcc

SEQ ID NO: 3651 - DNA, 22 bp, Artificial Sequence
  Description of Artificial Sequence: Synthetic oligonucleotide
attctttgaagaggaagaagca

SEQ ID NO: 3652 - DNA, 22 bp, Artificial Sequence
  Description of Artificial Sequence: Synthetic oligonucleotide
taccagttcatctaatatgcgg

SEQ ID NO: 3653 - DNA, 22 bp, Artificial Sequence
  Description of Artificial Sequence: Synthetic oligonucleotide
tatctgtgagaatttccttccc

SEQ ID NO: 3654 - DNA, 22 bp, Artificial Sequence
  Description of Artificial Sequence: Synthetic oligonucleotide
ttgttatctgtgagaatttcct

SEQ ID NO: 3655 - DNA, 22 bp, Artificial Sequence
  Description of Artificial Sequence: Synthetic oligonucleotide
aatctgggtcttgctatgccgg

SEQ ID NO: 3656 - DNA, 22 bp, Artificial Sequence
  Description of Artificial Sequence: Synthetic oligonucleotide
atattgtgctgcttcagttggt

SEQ ID NO: 3657 - DNA, 22 bp, Artificial Sequence
  Description of Artificial Sequence: Synthetic oligonucleotide
ttgaggatggtcggcgtatggt

SEQ ID NO: 3658 - DNA, 22 bp, Artificial Sequence
  Description of Artificial Sequence: Synthetic oligonucleotide
tttagcaagcaagttggccggg

SEQ ID NO: 3659 - DNA, 22 bp, Artificial Sequence
  Description of Artificial Sequence: Synthetic oligonucleotide
tatcaacatcagagtgaagctt

SEQ ID NO: 3660 - DNA, 22 bp, Artificial Sequence
  Description of Artificial Sequence: Synthetic oligonucleotide
aatctttcccaaataaattccc

SEQ ID NO: 3661 - DNA, 22 bp, Artificial Sequence
  Description of Artificial Sequence: Synthetic oligonucleotide
taaggttccaaggctatgagta

SEQ ID NO: 3662 - DNA, 22 bp, Artificial Sequence
  Description of Artificial Sequence: Synthetic oligonucleotide
tacaatgttcactgtagtcctg

SEQ ID NO: 3663 - DNA, 22 bp, Artificial Sequence
  Description of Artificial Sequence: Synthetic oligonucleotide
aataataaagacaccaacaggg

SEQ ID NO: 3664 - DNA, 22 bp, Artificial Sequence
  Description of Artificial Sequence: Synthetic oligonucleotide
attaatctccagccagttggca

SEQ ID NO: 3665 - DNA, 22 bp, Artificial Sequence
  Description of Artificial Sequence: Synthetic oligonucleotide
atcacactcaggagaatggtcc

SEQ ID NO: 3666 - DNA, 22 bp, Artificial Sequence
  Description of Artificial Sequence: Synthetic oligonucleotide
tgtatagatcgccctcgtccac

SEQ ID NO: 3667 - DNA, 22 bp, Artificial Sequence
  Description of Artificial Sequence: Synthetic oligonucleotide
gtctcgtagatgttagggtgcc

SEQ ID NO: 3668 - DNA, 22 bp, Artificial Sequence
  Description of Artificial Sequence: Synthetic oligonucleotide
tattcattcagaggcagcagct

SEQ ID NO: 3669 - DNA, 22 bp, Artificial Sequence
  Description of Artificial Sequence: Synthetic oligonucleotide
tcatcctttaagtcactctcta

SEQ ID NO: 3670 - DNA, 22 bp, Artificial Sequence
  Description of Artificial Sequence: Synthetic oligonucleotide
atcagaattgaaagagccagcg

SEQ ID NO: 3671 - DNA, 22 bp, Artificial Sequence
  Description of Artificial Sequence: Synthetic oligonucleotide
tttccatctgcaaatgaaaggg

SEQ ID NO: 3672 - DNA, 22 bp, Artificial Sequence
  Description of Artificial Sequence: Synthetic oligonucleotide
tttcaccaccttataaatgcca

SEQ ID NO: 3673 - DNA, 22 bp, Artificial Sequence
  Description of Artificial Sequence: Synthetic oligonucleotide
tttatctgaagggtaacctgct

SEQ ID NO: 3674 - DNA, 22 bp, Artificial Sequence
  Description of Artificial Sequence: Synthetic oligonucleotide
tttgtggttccactgggctgct

SEQ ID NO: 3675 - DNA, 22 bp, Artificial Sequence
  Description of Artificial Sequence: Synthetic oligonucleotide
ttgtaagaagagggctgcgcct

SEQ ID NO: 3676 - DNA, 22 bp, Artificial Sequence
  Description of Artificial Sequence: Synthetic oligonucleotide
atatgtgaactctgttatccgt

SEQ ID NO: 3677 - DNA, 22 bp, Artificial Sequence
  Description of Artificial Sequence: Synthetic oligonucleotide
tttctttcacatagtcataggc

SEQ ID NO: 3678 - DNA, 22 bp, Artificial Sequence
  Description of Artificial Sequence: Synthetic oligonucleotide
aactttcatccgtttgtgtgct

SEQ ID NO: 3679 - DNA, 22 bp, Artificial Sequence
  Description of Artificial Sequence: Synthetic oligonucleotide
aactattgcaatataatggcct

SEQ ID NO: 3680 - DNA, 22 bp, Artificial Sequence
  Description of Artificial Sequence: Synthetic oligonucleotide
taagtttctatagatatagggc

SEQ ID NO: 3681 - DNA, 22 bp, Artificial Sequence
  Description of Artificial Sequence: Synthetic oligonucleotide
taagatttccagtatgtcagct

SEQ ID NO: 3682 - DNA, 22 bp, Artificial Sequence
  Description of Artificial Sequence: Synthetic oligonucleotide
ttaacctacaagtgaaacagcc

SEQ ID NO: 3683 - DNA, 22 bp, Artificial Sequence
  Description of Artificial Sequence: Synthetic oligonucleotide
taatgttaagaattgccctcct

SEQ ID NO: 3684 - DNA, 22 bp, Artificial Sequence
  Description of Artificial Sequence: Synthetic oligonucleotide
atatctcaccactaggcctggc

SEQ ID NO: 3685 - DNA, 22 bp, Artificial Sequence
  Description of Artificial Sequence: Synthetic oligonucleotide
atagtcaaatagctactgccct

SEQ ID NO: 3686 - DNA, 22 bp, Artificial Sequence
  Description of Artificial Sequence: Synthetic oligonucleotide
ttattaagacaagtgctctgcc

SEQ ID NO: 3687 - DNA, 22 bp, Artificial Sequence
  Description of Artificial Sequence: Synthetic oligonucleotide
tttcttctaaacattctgagca

SEQ ID NO: 3688 - DNA, 22 bp, Artificial Sequence
  Description of Artificial Sequence: Synthetic oligonucleotide
attcataacaccatataatcca

SEQ ID NO: 3689 - DNA, 22 bp, Artificial Sequence
  Description of Artificial Sequence: Synthetic oligonucleotide
tttcatcacattcataacacca

SEQ ID NO: 3690 - DNA, 22 bp, Artificial Sequence
  Description of Artificial Sequence: Synthetic oligonucleotide
attaaacccatctctaaaggct

SEQ ID NO: 3691 - DNA, 22 bp, Artificial Sequence
  Description of Artificial Sequence: Synthetic oligonucleotide
tttaaagtctctgatgtctccc

SEQ ID NO: 3692 - DNA, 22 bp, Artificial Sequence
  Description of Artificial Sequence: Synthetic oligonucleotide
ttctcagcatctgatgtcagcc

SEQ ID NO: 3693 - DNA, 22 bp, Artificial Sequence
  Description of Artificial Sequence: Synthetic oligonucleotide
ttctcggtctaaatcaaagcca

SEQ ID NO: 3694 - DNA, 22 bp, Artificial Sequence
  Description of Artificial Sequence: Synthetic oligonucleotide
tttaatgtcgtaagaaggtggc

SEQ ID NO: 3695 - DNA, 22 bp, Artificial Sequence
  Description of Artificial Sequence: Synthetic oligonucleotide
ttgcttgatggtctgtattgcc

SEQ ID NO: 3696 - DNA, 22 bp, Artificial Sequence
  Description of Artificial Sequence: Synthetic oligonucleotide
ttaaatcaggattataactcct

SEQ ID NO: 3697 - DNA, 22 bp, Artificial Sequence
  Description of Artificial Sequence: Synthetic oligonucleotide
tttcttcggaagattcttcggt

SEQ ID NO: 3698 - DNA, 22 bp, Artificial Sequence
  Description of Artificial Sequence: Synthetic oligonucleotide
ttatcttcttcttctacagcct

SEQ ID NO: 3699 - DNA, 22 bp, Artificial Sequence
  Description of Artificial Sequence: Synthetic oligonucleotide
tttacattccagttaactacct

SEQ ID NO: 3700 - DNA, 22 bp, Artificial Sequence
  Description of Artificial Sequence: Synthetic oligonucleotide
atcttatagtgcttgatcagct

SEQ ID NO: 3701 - DNA, 22 bp, Artificial Sequence
  Description of Artificial Sequence: Synthetic oligonucleotide
ttcactgtcgatgattcgagcc

SEQ ID NO: 3702 - DNA, 22 bp, Artificial Sequence
  Description of Artificial Sequence: Synthetic oligonucleotide
taacacagtccttgtagatgcg

SEQ ID NO: 3703 - DNA, 22 bp, Artificial Sequence
  Description of Artificial Sequence: Synthetic oligonucleotide
attctccatcacagtaattggc

SEQ ID NO: 3704 - DNA, 22 bp, Artificial Sequence
  Description of Artificial Sequence: Synthetic oligonucleotide
tttatagacaatctgaaatggg

SEQ ID NO: 3705 - DNA, 22 bp, Artificial Sequence
  Description of Artificial Sequence: Synthetic oligonucleotide
ttagcatatgcttcccagaggg

SEQ ID NO: 3706 - DNA, 22 bp, Artificial Sequence
  Description of Artificial Sequence: Synthetic oligonucleotide
atttctaaccataaatgctcct

SEQ ID NO: 3707 - DNA, 22 bp, Artificial Sequence
  Description of Artificial Sequence: Synthetic oligonucleotide
atattgttgctgagaatctggc

SEQ ID NO: 3708 - DNA, 22 bp, Artificial Sequence
  Description of Artificial Sequence: Synthetic oligonucleotide
taagaatctcactacagtgcct

SEQ ID NO: 3709 - DNA, 22 bp, Artificial Sequence
  Description of Artificial Sequence: Synthetic oligonucleotide
atatcctatctgtgtgacgcct

SEQ ID NO: 3710 - DNA, 22 bp, Artificial Sequence
  Description of Artificial Sequence: Synthetic oligonucleotide
taattaaatgctaattggtggt

SEQ ID NO: 3711 - DNA, 22 bp, Artificial Sequence
  Description of Artificial Sequence: Synthetic oligonucleotide
taagtgctggatatacttggct

SEQ ID NO: 3712 - DNA, 22 bp, Artificial Sequence
  Description of Artificial Sequence: Synthetic oligonucleotide
tagtttcaggacttctggtgga

SEQ ID NO: 3713 - DNA, 22 bp, Artificial Sequence
  Description of Artificial Sequence: Synthetic oligonucleotide
ttcaatatcttcattgatagga

SEQ ID NO: 3714 - DNA, 22 bp, Artificial Sequence
  Description of Artificial Sequence: Synthetic oligonucleotide
ttcctgagacacattctgtcca

SEQ ID NO: 3715 - DNA, 22 bp, Artificial Sequence
  Description of Artificial Sequence: Synthetic oligonucleotide
ataatgtttggatgtgagaggc

SEQ ID NO: 3716 - DNA, 22 bp, Artificial Sequence
  Description of Artificial Sequence: Synthetic oligonucleotide
ttctctttacattcagaccggt

SEQ ID NO: 3717 - DNA, 22 bp, Artificial Sequence
  Description of Artificial Sequence: Synthetic oligonucleotide
ttatccaaggcatcatcgaggt

SEQ ID NO: 3718 - DNA, 22 bp, Artificial Sequence
  Description of Artificial Sequence: Synthetic oligonucleotide
aataacattaagtttgtctcct

SEQ ID NO: 3719 - DNA, 22 bp, Artificial Sequence
  Description of Artificial Sequence: Synthetic oligonucleotide
atatgctcaaatacctttgcct

SEQ ID NO: 3720 - DNA, 22 bp, Artificial Sequence
  Description of Artificial Sequence: Synthetic oligonucleotide
taattgggtcccaggcgatggc

SEQ ID NO: 3721 - DNA, 22 bp, Artificial Sequence
  Description of Artificial Sequence: Synthetic oligonucleotide
tttgtgcatccttcaggtggcc

SEQ ID NO: 3722 - DNA, 22 bp, Artificial Sequence
  Description of Artificial Sequence: Synthetic oligonucleotide
atttgttcccatattgcaggca

SEQ ID NO: 3723 - DNA, 22 bp, Artificial Sequence
  Description of Artificial Sequence: Synthetic oligonucleotide
ttaacaaatagcttcattacct

SEQ ID NO: 3724 - DNA, 22 bp, Artificial Sequence
  Description of Artificial Sequence: Synthetic oligonucleotide
ttaacctttcagtcccagagct

SEQ ID NO: 3725 - DNA, 22 bp, Artificial Sequence
  Description of Artificial Sequence: Synthetic oligonucleotide
tatttacatgacataaggtgca

SEQ ID NO: 3726 - DNA, 22 bp, Artificial Sequence
  Description of Artificial Sequence: Synthetic oligonucleotide
ttatagcttctctggctgaggc

SEQ ID NO: 3727 - DNA, 22 bp, Artificial Sequence
  Description of Artificial Sequence: Synthetic oligonucleotide
atatggatgctttgtgagtcct

SEQ ID NO: 3728 - DNA, 22 bp, Artificial Sequence
  Description of Artificial Sequence: Synthetic oligonucleotide
atctctttactgataaaccggg

SEQ ID NO: 3729 - DNA, 22 bp, Artificial Sequence
  Description of Artificial Sequence: Synthetic oligonucleotide
attacagaggtctgtgactgga

SEQ ID NO: 3730 - DNA, 22 bp, Artificial Sequence
  Description of Artificial Sequence: Synthetic oligonucleotide
atgagatataacctggaatcct

SEQ ID NO: 3731 - DNA, 22 bp, Artificial Sequence
  Description of Artificial Sequence: Synthetic oligonucleotide
atacttctggagatctgtacca

SEQ ID NO: 3732 - DNA, 22 bp, Artificial Sequence
  Description of Artificial Sequence: Synthetic oligonucleotide
atctgttgacataacatatgga

SEQ ID NO: 3733 - DNA, 22 bp, Artificial Sequence
  Description of Artificial Sequence: Synthetic oligonucleotide
attctgctgacgaggactcggc

SEQ ID NO: 3734 - DNA, 22 bp, Artificial Sequence
  Description of Artificial Sequence: Synthetic oligonucleotide
tttactgtccaatggcccagga

SEQ ID NO: 3735 - DNA, 22 bp, Artificial Sequence
  Description of Artificial Sequence: Synthetic oligonucleotide
ataacaaactctttaatgaggt

SEQ ID NO: 3736 - DNA, 22 bp, Artificial Sequence
  Description of Artificial Sequence: Synthetic oligonucleotide
gtatgcatacaagaagtcggcc

SEQ ID NO: 3737 - DNA, 22 bp, Artificial Sequence
  Description of Artificial Sequence: Synthetic oligonucleotide
taatatctactgcatgtgccct

SEQ ID NO: 3738 - DNA, 22 bp, Artificial Sequence
  Description of Artificial Sequence: Synthetic oligonucleotide
atatcaagtaaatagatctgca

SEQ ID NO: 3739 - DNA, 22 bp, Artificial Sequence
  Description of Artificial Sequence: Synthetic oligonucleotide
atttctcttaatagtcactgga

SEQ ID NO: 3740 - DNA, 22 bp, Artificial Sequence
  Description of Artificial Sequence: Synthetic oligonucleotide
ctttaagataccattacatgct

SEQ ID NO: 3741 - DNA, 22 bp, Artificial Sequence
  Description of Artificial Sequence: Synthetic oligonucleotide
tttgaagaactttctctaacgt

SEQ ID NO: 3742 - DNA, 22 bp, Artificial Sequence
  Description of Artificial Sequence: Synthetic oligonucleotide
ttcaagtttctgaatgtttccc

SEQ ID NO: 3743 - DNA, 22 bp, Artificial Sequence
  Description of Artificial Sequence: Synthetic oligonucleotide
ataaattcagaaggaggctcca

SEQ ID NO: 3744 - DNA, 22 bp, Artificial Sequence
  Description of Artificial Sequence: Synthetic oligonucleotide
tatactataaaccaactttgca

SEQ ID NO: 3745 - DNA, 22 bp, Artificial Sequence
  Description of Artificial Sequence: Synthetic oligonucleotide
tttataatagctgtttcaggct

SEQ ID NO: 3746 - DNA, 22 bp, Artificial Sequence
  Description of Artificial Sequence: Synthetic oligonucleotide
tttgagcaacaagaaatctccc

SEQ ID NO: 3747 - DNA, 22 bp, Artificial Sequence
  Description of Artificial Sequence: Synthetic oligonucleotide
atattaggatggttaagctcct

SEQ ID NO: 3748 - DNA, 22 bp, Artificial Sequence
  Description of Artificial Sequence: Synthetic oligonucleotide
ttaaggtctcggtggaggaccc

SEQ ID NO: 3749 - DNA, 22 bp, Artificial Sequence
  Description of Artificial Sequence: Synthetic oligonucleotide
tttaaggcaagttcagagggcc

SEQ ID NO: 3750 - DNA, 22 bp, Artificial Sequence
  Description of Artificial Sequence: Synthetic oligonucleotide
ttaagataccattacatgctgt

SEQ ID NO: 3751 - DNA, 22 bp, Artificial Sequence
  Description of Artificial Sequence: Synthetic oligonucleotide
ttcttaatggcgacaatttggt

SEQ ID NO: 3752 - DNA, 22 bp, Artificial Sequence
  Description of Artificial Sequence: Synthetic oligonucleotide
atatttggatgacttagctcct

SEQ ID NO: 3753 - DNA, 22 bp, Artificial Sequence
  Description of Artificial Sequence: Synthetic oligonucleotide
ataacctctagatcagtttcca

SEQ ID NO: 3754 - DNA, 22 bp, Artificial Sequence
  Description of Artificial Sequence: Synthetic oligonucleotide
ttgatgtgtgatggtgtcagca

SEQ ID NO: 3755 - DNA, 22 bp, Artificial Sequence
  Description of Artificial Sequence: Synthetic oligonucleotide
ttacaaactcacttctacagca

SEQ ID NO: 3756 - DNA, 22 bp, Artificial Sequence
  Description of Artificial Sequence: Synthetic oligonucleotide
cataaattcaagcttgtcggca

SEQ ID NO: 3757 - DNA, 22 bp, Artificial Sequence
  Description of Artificial Sequence: Synthetic oligonucleotide
atttctctaataatcacttggt

SEQ ID NO: 3758 - DNA, 22 bp, Artificial Sequence
  Description of Artificial Sequence: Synthetic oligonucleotide
aattatgtaacaccaatcagct

SEQ ID NO: 3759 - DNA, 22 bp, Artificial Sequence
  Description of Artificial Sequence: Synthetic oligonucleotide
tttaggaattggtgtggctgcc

SEQ ID NO: 3760 - DNA, 22 bp, Artificial Sequence
  Description of Artificial Sequence: Synthetic oligonucleotide
ttactgtcagccattgggtgga

SEQ ID NO: 3761 - DNA, 22 bp, Artificial Sequence
  Description of Artificial Sequence: Synthetic oligonucleotide
tagtttctgaaatattgcaggc

SEQ ID NO: 3762 - DNA, 22 bp, Artificial Sequence
  Description of Artificial Sequence: Synthetic oligonucleotide
atataaccagcaatgagagggc

SEQ ID NO: 3763 - DNA, 22 bp, Artificial Sequence
  Description of Artificial Sequence: Synthetic oligonucleotide
tttattcagatcctttcctggt

SEQ ID NO: 3764 - DNA, 22 bp, Artificial Sequence
  Description of Artificial Sequence: Synthetic oligonucleotide
taaactctaccaagggtgacgg

SEQ ID NO: 3765 - DNA, 22 bp, Artificial Sequence
  Description of Artificial Sequence: Synthetic oligonucleotide
ttcagcttgaacttgttgtggg

SEQ ID NO: 3766 - DNA, 22 bp, Artificial Sequence
  Description of Artificial Sequence: Synthetic oligonucleotide
tactcgtttcatattgcctcct

SEQ ID NO: 3767 - DNA, 22 bp, Artificial Sequence
  Description of Artificial Sequence: Synthetic oligonucleotide
tttgccaaactgaggcagaggg

SEQ ID NO: 3768 - DNA, 22 bp, Artificial Sequence
  Description of Artificial Sequence: Synthetic oligonucleotide
ttctggatacagagcacatcgt

SEQ ID NO: 3769 - DNA, 22 bp, Artificial Sequence
  Description of Artificial Sequence: Synthetic oligonucleotide
ttacatgatccctgtaacagcc

SEQ ID NO: 3770 - DNA, 22 bp, Artificial Sequence
  Description of Artificial Sequence: Synthetic oligonucleotide
tacactgaaacataaatccgca

SEQ ID NO: 3771 - DNA, 22 bp, Artificial Sequence
  Description of Artificial Sequence: Synthetic oligonucleotide
ttattgacgtacttacttccct

SEQ ID NO: 3772 - DNA, 22 bp, Artificial Sequence
  Description of Artificial Sequence: Synthetic oligonucleotide
ttcatgcaggtctgtttcaggc

SEQ ID NO: 3773 - DNA, 22 bp, Artificial Sequence
  Description of Artificial Sequence: Synthetic oligonucleotide
ttagcagctcgttgtatttcct

SEQ ID NO: 3774 - DNA, 22 bp, Artificial Sequence
  Description of Artificial Sequence: Synthetic oligonucleotide
attgtgctgaacttgcgcaggc

SEQ ID NO: 3775 - DNA, 22 bp, Artificial Sequence
  Description of Artificial Sequence: Synthetic oligonucleotide
tttcccaatccctggaaggcct

SEQ ID NO: 3776 - DNA, 22 bp, Artificial Sequence
  Description of Artificial Sequence: Synthetic oligonucleotide
taaatgcaggcatctcataggc

SEQ ID NO: 3777 - DNA, 22 bp, Artificial Sequence
  Description of Artificial Sequence: Synthetic oligonucleotide
atccatcagcgccaggtgtgcc

SEQ ID NO: 3778 - DNA, 22 bp, Artificial Sequence
  Description of Artificial Sequence: Synthetic oligonucleotide
atgaccgtccactgtgcttcgg

SEQ ID NO: 3779 - DNA, 22 bp, Artificial Sequence
  Description of Artificial Sequence: Synthetic oligonucleotide
ttacaggtttattagctagggc

SEQ ID NO: 3780 - DNA, 22 bp, Artificial Sequence
  Description of Artificial Sequence: Synthetic oligonucleotide
ttagacaagaccttgatgtgcc

SEQ ID NO: 3781 - DNA, 22 bp, Artificial Sequence
  Description of Artificial Sequence: Synthetic oligonucleotide
tttaagaatcatcagaaggcca

SEQ ID NO: 3782 - DNA, 22 bp, Artificial Sequence
  Description of Artificial Sequence: Synthetic oligonucleotide
tattccttgtattccaggaggt

SEQ ID NO: 3783 - DNA, 22 bp, Artificial Sequence
  Description of Artificial Sequence: Synthetic oligonucleotide
attaaatggaataccaggtggt

SEQ ID NO: 3784 - DNA, 22 bp, Artificial Sequence
  Description of Artificial Sequence: Synthetic oligonucleotide
ttatataaactgctcatgccgt

SEQ ID NO: 3785 - DNA, 22 bp, Artificial Sequence
  Description of Artificial Sequence: Synthetic oligonucleotide
aatctcaagaacttggtctccc

SEQ ID NO: 3786 - DNA, 22 bp, Artificial Sequence
  Description of Artificial Sequence: Synthetic oligonucleotide
ttctctttgtccaacaggacct

SEQ ID NO: 3787 - DNA, 22 bp, Artificial Sequence
  Description of Artificial Sequence: Synthetic oligonucleotide
ttatttgctgtccaaagtgccg

SEQ ID NO: 3788 - DNA, 22 bp, Artificial Sequence
  Description of Artificial Sequence: Synthetic oligonucleotide
atcagaaacaatcttatttgct

SEQ ID NO: 3789 - DNA, 22 bp, Artificial Sequence
  Description of Artificial Sequence: Synthetic oligonucleotide
tttgatgtagaaagtgtctccc

SEQ ID NO: 3790 - DNA, 22 bp, Artificial Sequence
  Description of Artificial Sequence: Synthetic oligonucleotide
atctaagaggaagtttaggcct

SEQ ID NO: 3791 - DNA, 22 bp, Artificial Sequence
  Description of Artificial Sequence: Synthetic oligonucleotide
ttcattctgcgaatttgctcct

SEQ ID NO: 3792 - DNA, 22 bp, Artificial Sequence
  Description of Artificial Sequence: Synthetic oligonucleotide
ttagacaataaactctctagga

SEQ ID NO: 3793 - DNA, 22 bp, Artificial Sequence
  Description of Artificial Sequence: Synthetic oligonucleotide
taaggacaggcatcactctgcc

SEQ ID NO: 3794 - DNA, 22 bp, Artificial Sequence
  Description of Artificial Sequence: Synthetic oligonucleotide
atcttatagagcttgctctcgt

SEQ ID NO: 3795 - DNA, 22 bp, Artificial Sequence
  Description of Artificial Sequence: Synthetic oligonucleotide
tttctgtctcttggtggcagcc

SEQ ID NO: 3796 - DNA, 22 bp, Artificial Sequence
  Description of Artificial Sequence: Synthetic oligonucleotide
ttcaggtatgtggcaaattcgg

SEQ ID NO: 3797 - DNA, 22 bp, Artificial Sequence
  Description of Artificial Sequence: Synthetic oligonucleotide
aacatttcgatcctagaccggg

SEQ ID NO: 3798 - DNA, 22 bp, Artificial Sequence
  Description of Artificial Sequence: Synthetic oligonucleotide
taacatttcgatcctagaccgg

SEQ ID NO: 3799 - DNA, 22 bp, Artificial Sequence
  Description of Artificial Sequence: Synthetic oligonucleotide
atcttgtagaacttgctctcga

SEQ ID NO: 3800 - DNA, 22 bp, Artificial Sequence
  Description of Artificial Sequence: Synthetic oligonucleotide
attatttgtgatgttgatggct

SEQ ID NO: 3801 - DNA, 22 bp, Artificial Sequence
  Description of Artificial Sequence: Synthetic oligonucleotide
attagtcgtagctttctgtgct

SEQ ID NO: 3802 - DNA, 22 bp, Artificial Sequence
  Description of Artificial Sequence: Synthetic oligonucleotide
atcgctttcgagagtgtctgcc

SEQ ID NO: 3803 - DNA, 22 bp, Artificial Sequence
  Description of Artificial Sequence: Synthetic oligonucleotide
atcaggagacagatagggccgt

SEQ ID NO: 3804 - DNA, 22 bp, Artificial Sequence
  Description of Artificial Sequence: Synthetic oligonucleotide
atctatcatgacattgtgaggt

SEQ ID NO: 3805 - DNA, 22 bp, Artificial Sequence
  Description of Artificial Sequence: Synthetic oligonucleotide
tttgtccagaagatctagggcc

SEQ ID NO: 3806 - DNA, 22 bp, Artificial Sequence
  Description of Artificial Sequence: Synthetic oligonucleotide
tttaccactgattcattgtgtt

SEQ ID NO: 3807 - DNA, 22 bp, Artificial Sequence
  Description of Artificial Sequence: Synthetic oligonucleotide
ttctctagcctgcaggaggcgt

SEQ ID NO: 3808 - DNA, 22 bp, Artificial Sequence
  Description of Artificial Sequence: Synthetic oligonucleotide
tatggtgttcagaaattgaggc

SEQ ID NO: 3809 - DNA, 22 bp, Artificial Sequence
  Description of Artificial Sequence: Synthetic oligonucleotide
tttaccactcagagaaggagct

SEQ ID NO: 3810 - DNA, 22 bp, Artificial Sequence
  Description of Artificial Sequence: Synthetic oligonucleotide
atactgtccatcaatatcagct

SEQ ID NO: 3811 - DNA, 22 bp, Artificial Sequence
  Description of Artificial Sequence: Synthetic oligonucleotide
atatcatctgaacccagaagct

SEQ ID NO: 3812 - DNA, 22 bp, Artificial Sequence
  Description of Artificial Sequence: Synthetic oligonucleotide
tttcccagtactgatcggtgcg

SEQ ID NO: 3813 - DNA, 22 bp, Artificial Sequence
  Description of Artificial Sequence: Synthetic oligonucleotide
atatccaagtagttgatgaggg

SEQ ID NO: 3814 - DNA, 22 bp, Artificial Sequence
  Description of Artificial Sequence: Synthetic oligonucleotide
ttcttctgttgcctcatatgga

SEQ ID NO: 3815 - DNA, 22 bp, Artificial Sequence
  Description of Artificial Sequence: Synthetic oligonucleotide
atcaatagcaacagaaatgggc

SEQ ID NO: 3816 - DNA, 22 bp, Artificial Sequence
  Description of Artificial Sequence: Synthetic oligonucleotide
atggtttctccggtctttggcc

SEQ ID NO: 3817 - DNA, 22 bp, Artificial Sequence
  Description of Artificial Sequence: Synthetic oligonucleotide
attccacaatggtttctccggt

SEQ ID NO: 3818 - DNA, 22 bp, Artificial Sequence
  Description of Artificial Sequence: Synthetic oligonucleotide
attcatgatgaaacctaatgct

SEQ ID NO: 3819 - DNA, 22 bp, Artificial Sequence
  Description of Artificial Sequence: Synthetic oligonucleotide
tttcactttcatgtaagtgcca

SEQ ID NO: 3820 - DNA, 22 bp, Artificial Sequence
  Description of Artificial Sequence: Synthetic oligonucleotide
ttaacctcggacctttcctggg

SEQ ID NO: 3821 - DNA, 22 bp, Artificial Sequence
  Description of Artificial Sequence: Synthetic oligonucleotide
aataagaatatctctagtagct

SEQ ID NO: 3822 - DNA, 22 bp, Artificial Sequence
  Description of Artificial Sequence: Synthetic oligonucleotide
aatacatgtgagacgacaaggc

SEQ ID NO: 3823 - DNA, 22 bp, Artificial Sequence
  Description of Artificial Sequence: Synthetic oligonucleotide
atatgccatgcttcacttgggc

SEQ ID NO: 3824 - DNA, 22 bp, Artificial Sequence
  Description of Artificial Sequence: Synthetic oligonucleotide
aatctttaggataaagaaagcc

SEQ ID NO: 3825 - DNA, 22 bp, Artificial Sequence
  Description of Artificial Sequence: Synthetic oligonucleotide
atttgtcaccattgtgataggt

SEQ ID NO: 3826 - DNA, 22 bp, Artificial Sequence
  Description of Artificial Sequence: Synthetic oligonucleotide
tattcattctgcagaaactggt

SEQ ID NO: 3827 - DNA, 22 bp, Artificial Sequence
  Description of Artificial Sequence: Synthetic oligonucleotide
atgtagttgaactcactcagcc

SEQ ID NO: 3828 - DNA, 22 bp, Artificial Sequence
  Description of Artificial Sequence: Synthetic oligonucleotide
atcctcatcgatattgtcaggc

SEQ ID NO: 3829 - DNA, 22 bp, Artificial Sequence
  Description of Artificial Sequence: Synthetic oligonucleotide
tatagggtttaaattctgaggt

SEQ ID NO: 3830 - DNA, 22 bp, Artificial Sequence
  Description of Artificial Sequence: Synthetic oligonucleotide
ttagacttcttcttaatgaggt

SEQ ID NO: 3831 - DNA, 22 bp, Artificial Sequence
  Description of Artificial Sequence: Synthetic oligonucleotide
ataagtaaacctcaatgggccc

SEQ ID NO: 3832 - DNA, 22 bp, Artificial Sequence
  Description of Artificial Sequence: Synthetic oligonucleotide
ttattccttcatagaggaaggg

SEQ ID NO: 3833 - DNA, 22 bp, Artificial Sequence
  Description of Artificial Sequence: Synthetic oligonucleotide
atctacctggagtaaactggct

SEQ ID NO: 3834 - DNA, 22 bp, Artificial Sequence
  Description of Artificial Sequence: Synthetic oligonucleotide
ttggtaatgtcgtaaatccgcc

SEQ ID NO: 3835 - DNA, 22 bp, Artificial Sequence
  Description of Artificial Sequence: Synthetic oligonucleotide
ttcgagttaaataaaccagcga

SEQ ID NO: 3836 - DNA, 22 bp, Artificial Sequence
  Description of Artificial Sequence: Synthetic oligonucleotide
tttcgagttaaataaaccagcg

SEQ ID NO: 3837 - DNA, 22 bp, Artificial Sequence
  Description of Artificial Sequence: Synthetic oligonucleotide
aaggagtttccaattatcacca

SEQ ID NO: 3838 - DNA, 22 bp, Artificial Sequence
  Description of Artificial Sequence: Synthetic oligonucleotide
ttgaatccaggaatagactcca

SEQ ID NO: 3839 - DNA, 22 bp, Artificial Sequence
  Description of Artificial Sequence: Synthetic oligonucleotide
tttcttactgagaatggaggct

SEQ ID NO: 3840 - DNA, 22 bp, Artificial Sequence
  Description of Artificial Sequence: Synthetic oligonucleotide
ttgatacagacatcaatatggt

SEQ ID NO: 3841 - DNA, 22 bp, Artificial Sequence
  Description of Artificial Sequence: Synthetic oligonucleotide
tttcatacagctatttgttggt

SEQ ID NO: 3842 - DNA, 22 bp, Artificial Sequence
  Description of Artificial Sequence: Synthetic oligonucleotide
taacatcttcacagtacttccg

SEQ ID NO: 3843 - DNA, 22 bp, Artificial Sequence
  Description of Artificial Sequence: Synthetic oligonucleotide
tttcaatcacagactgcttggc

SEQ ID NO: 3844 - DNA, 22 bp, Artificial Sequence
  Description of Artificial Sequence: Synthetic oligonucleotide
tttcttacggaatagtggtggt

SEQ ID NO: 3845 - DNA, 22 bp, Artificial Sequence
  Description of Artificial Sequence: Synthetic oligonucleotide
ttagctgataggagagaatggg

SEQ ID NO: 3846 - DNA, 22 bp, Artificial Sequence
  Description of Artificial Sequence: Synthetic oligonucleotide
tttaaatgcagtccactctgct

SEQ ID NO: 3847 - DNA, 22 bp, Artificial Sequence
  Description of Artificial Sequence: Synthetic oligonucleotide
ataatatagagacttgcctgca

SEQ ID NO: 3848 - DNA, 22 bp, Artificial Sequence
  Description of Artificial Sequence: Synthetic oligonucleotide
taataatcaaactagtgctcca

SEQ ID NO: 3849 - DNA, 22 bp, Artificial Sequence
  Description of Artificial Sequence: Synthetic oligonucleotide
attcagtttaaagggatcagga

SEQ ID NO: 3850 - DNA, 22 bp, Artificial Sequence
  Description of Artificial Sequence: Synthetic oligonucleotide
ttatgcttgatgtctagtcgct

SEQ ID NO: 3851 - DNA, 22 bp, Artificial Sequence
  Description of Artificial Sequence: Synthetic oligonucleotide
ttaagtgttccaactggtaggc

SEQ ID NO: 3852 - DNA, 22 bp, Artificial Sequence
  Description of Artificial Sequence: Synthetic oligonucleotide
ttgtatatgctgttattcaggt

SEQ ID NO: 3853 - DNA, 22 bp, Artificial Sequence
  Description of Artificial Sequence: Synthetic oligonucleotide
aatgctaatggtaataacaggt

SEQ ID NO: 3854 - DNA, 22 bp, Artificial Sequence
  Description of Artificial Sequence: Synthetic oligonucleotide
aatctaaagcatgttatgtgca

SEQ ID NO: 3855 - DNA, 22 bp, Artificial Sequence
  Description of Artificial Sequence: Synthetic oligonucleotide
tacaatgtcaaccatagaagct

SEQ ID NO: 3856 - DNA, 22 bp, Artificial Sequence
  Description of Artificial Sequence: Synthetic oligonucleotide
attcttacttctctgaagagct

SEQ ID NO: 3857 - DNA, 22 bp, Artificial Sequence
  Description of Artificial Sequence: Synthetic oligonucleotide
atagtcaaatacttcacctcca

SEQ ID NO: 3858 - DNA, 22 bp, Artificial Sequence
  Description of Artificial Sequence: Synthetic oligonucleotide
tattaggattacttgcattccc

SEQ ID NO: 3859 - DNA, 22 bp, Artificial Sequence
  Description of Artificial Sequence: Synthetic oligonucleotide
tttgctcagcagatacattgcg

SEQ ID NO: 3860 - DNA, 22 bp, Artificial Sequence
  Description of Artificial Sequence: Synthetic oligonucleotide
aatttacatcataatcactggg

SEQ ID NO: 3861 - DNA, 22 bp, Artificial Sequence
  Description of Artificial Sequence: Synthetic oligonucleotide
attgtctttctggcgccgaggt

SEQ ID NO: 3862 - DNA, 22 bp, Artificial Sequence
  Description of Artificial Sequence: Synthetic oligonucleotide
tacttaagtcatattccaagca

SEQ ID NO: 3863 - DNA, 22 bp, Artificial Sequence
  Description of Artificial Sequence: Synthetic oligonucleotide
tatactggatatattctgtggc

SEQ ID NO: 3864 - DNA, 22 bp, Artificial Sequence
  Description of Artificial Sequence: Synthetic oligonucleotide
tatttcttagaaatacacacgg

SEQ ID NO: 3865 - DNA, 22 bp, Artificial Sequence
  Description of Artificial Sequence: Synthetic oligonucleotide
attaagttccactatatctccc

SEQ ID NO: 3866 - DNA, 22 bp, Artificial Sequence
  Description of Artificial Sequence: Synthetic oligonucleotide
atttctgagcccaggactggcc

SEQ ID NO: 3867 - DNA, 22 bp, Artificial Sequence
  Description of Artificial Sequence: Synthetic oligonucleotide
ttaacattacaggcaatcagga

SEQ ID NO: 3868 - DNA, 22 bp, Artificial Sequence
  Description of Artificial Sequence: Synthetic oligonucleotide
caagtcatcaatattgacaggt

SEQ ID NO: 3869 - DNA, 22 bp, Artificial Sequence
  Description of Artificial Sequence: Synthetic oligonucleotide
tataattctcttatagacaggt

SEQ ID NO: 3870 - DNA, 22 bp, Artificial Sequence
  Description of Artificial Sequence: Synthetic oligonucleotide
atttcaggttgtctaaattcct

SEQ ID NO: 3871 - DNA, 22 bp, Artificial Sequence
  Description of Artificial Sequence: Synthetic oligonucleotide
aatctgaataccaatccttcct

SEQ ID NO: 3872 - DNA, 22 bp, Artificial Sequence
  Description of Artificial Sequence: Synthetic oligonucleotide
tatacatctgactgaaagctgt

SEQ ID NO: 3873 - DNA, 22 bp, Artificial Sequence
  Description of Artificial Sequence: Synthetic oligonucleotide
tactccatgaagatggtcaggg

SEQ ID NO: 3874 - DNA, 22 bp, Artificial Sequence
  Description of Artificial Sequence: Synthetic oligonucleotide
aacactcttcataccctggcgt

SEQ ID NO: 3875 - DNA, 22 bp, Artificial Sequence
  Description of Artificial Sequence: Synthetic oligonucleotide
ataaggcagcatgacatttgct

SEQ ID NO: 3876 - DNA, 22 bp, Artificial Sequence
  Description of Artificial Sequence: Synthetic oligonucleotide
ttcagagttctatgtgactggt

SEQ ID NO: 3877 - DNA, 22 bp, Artificial Sequence
  Description of Artificial Sequence: Synthetic oligonucleotide
aattactcttcatattacacca

SEQ ID NO: 3878 - DNA, 22 bp, Artificial Sequence
  Description of Artificial Sequence: Synthetic oligonucleotide
ttccttcaattcatctatggca

SEQ ID NO: 3879 - DNA, 22 bp, Artificial Sequence
  Description of Artificial Sequence: Synthetic oligonucleotide
aatgatgaacaaataggctccc

SEQ ID NO: 3880 - DNA, 22 bp, Artificial Sequence
  Description of Artificial Sequence: Synthetic oligonucleotide
taagctgtgcgaagggctcggg

SEQ ID NO: 3881 - DNA, 22 bp, Artificial Sequence
  Description of Artificial Sequence: Synthetic oligonucleotide
attccctgagacaggctctggt

SEQ ID NO: 3882 - DNA, 22 bp, Artificial Sequence
  Description of Artificial Sequence: Synthetic oligonucleotide
attactccagagttggaaggct

SEQ ID NO: 3883 - DNA, 22 bp, Artificial Sequence
  Description of Artificial Sequence: Synthetic oligonucleotide
ttgtgttagaagagttatccct

SEQ ID NO: 3884 - DNA, 22 bp, Artificial Sequence
  Description of Artificial Sequence: Synthetic oligonucleotide
tttaaagatcaggatttctccc

SEQ ID NO: 3885 - DNA, 22 bp, Artificial Sequence
  Description of Artificial Sequence: Synthetic oligonucleotide
tattagcttcatttaaagtgcc

SEQ ID NO: 3886 - DNA, 22 bp, Artificial Sequence
  Description of Artificial Sequence: Synthetic oligonucleotide
tatgcatgtgttattaatagca

SEQ ID NO: 3887 - DNA, 22 bp, Artificial Sequence
  Description of Artificial Sequence: Synthetic oligonucleotide
tttgcatctccttgagtttggc

SEQ ID NO: 3888 - DNA, 22 bp, Artificial Sequence
  Description of Artificial Sequence: Synthetic oligonucleotide
tagtctttatccataatatggt

SEQ ID NO: 3889 - DNA, 22 bp, Artificial Sequence
  Description of Artificial Sequence: Synthetic oligonucleotide
atttcattcagctattaggcct

SEQ ID NO: 3890 - DNA, 22 bp, Artificial Sequence
  Description of Artificial Sequence: Synthetic oligonucleotide
tatttcattcagctattaggcc

SEQ ID NO: 3891 - DNA, 22 bp, Artificial Sequence
  Description of Artificial Sequence: Synthetic oligonucleotide
ttatgtaggaagaacaggaccc

SEQ ID NO: 3892 - DNA, 22 bp, Artificial Sequence
  Description of Artificial Sequence: Synthetic oligonucleotide
tttggtggtcttacaccgaggg

SEQ ID NO: 3893 - DNA, 22 bp, Artificial Sequence
  Description of Artificial Sequence: Synthetic oligonucleotide
atatgtctctatctgcagtggc

SEQ ID NO: 3894 - DNA, 22 bp, Artificial Sequence
  Description of Artificial Sequence: Synthetic oligonucleotide
ataaatggttaactgggctgcc

SEQ ID NO: 3895 - DNA, 22 bp, Artificial Sequence
  Description of Artificial Sequence: Synthetic oligonucleotide
atcttataaatggttaactggg

SEQ ID NO: 3896 - DNA, 22 bp, Artificial Sequence
  Description of Artificial Sequence: Synthetic oligonucleotide
attgtgtaggtagttcatgccc

SEQ ID NO: 3897 - DNA, 22 bp, Artificial Sequence
  Description of Artificial Sequence: Synthetic oligonucleotide
tttggagaagagggagagacgg

SEQ ID NO: 3898 - DNA, 22 bp, Artificial Sequence
  Description of Artificial Sequence: Synthetic oligonucleotide
ttatgctcaaagccagagggca

SEQ ID NO: 3899 - DNA, 22 bp, Artificial Sequence
  Description of Artificial Sequence: Synthetic oligonucleotide
atactgtaggagacaagatgct

SEQ ID NO: 3900 - DNA, 22 bp, Artificial Sequence
  Description of Artificial Sequence: Synthetic oligonucleotide
atagtacttcctggccctcggc

SEQ ID NO: 3901 - DNA, 22 bp, Artificial Sequence
  Description of Artificial Sequence: Synthetic oligonucleotide
tattcaggaaggcggcacagct

SEQ ID NO: 3902 - DNA, 22 bp, Artificial Sequence
  Description of Artificial Sequence: Synthetic oligonucleotide
tatgacattcaccatctacgca

SEQ ID NO: 3903 - DNA, 22 bp, Artificial Sequence
  Description of Artificial Sequence: Synthetic oligonucleotide
ttaattccagatgaaacccggc

SEQ ID NO: 3904 - DNA, 22 bp, Artificial Sequence
  Description of Artificial Sequence: Synthetic oligonucleotide
tactgattgaactgcgtctcca

SEQ ID NO: 3905 - DNA, 22 bp, Artificial Sequence
  Description of Artificial Sequence: Synthetic oligonucleotide
ttatatcgagaggctgcttccg

SEQ ID NO: 3906 - DNA, 22 bp, Artificial Sequence
  Description of Artificial Sequence: Synthetic oligonucleotide
attattgtactccatttgtgga

SEQ ID NO: 3907 - DNA, 22 bp, Artificial Sequence
  Description of Artificial Sequence: Synthetic oligonucleotide
tttgctcctctgcttggacgga

SEQ ID NO: 3908 - DNA, 22 bp, Artificial Sequence
  Description of Artificial Sequence: Synthetic oligonucleotide
tttgtgtttcaactgttctcgt

SEQ ID NO: 3909 - DNA, 22 bp, Artificial Sequence
  Description of Artificial Sequence: Synthetic oligonucleotide
tttactttgctcaggcggcgcc

SEQ ID NO: 3910 - DNA, 22 bp, Artificial Sequence
  Description of Artificial Sequence: Synthetic oligonucleotide
aatattaacatcatagcctgcc

SEQ ID NO: 3911 - DNA, 22 bp, Artificial Sequence
  Description of Artificial Sequence: Synthetic oligonucleotide
attagtggagatttcttgtccc

SEQ ID NO: 3912 - DNA, 22 bp, Artificial Sequence
  Description of Artificial Sequence: Synthetic oligonucleotide
tatgcctacaagactatttggc

SEQ ID NO: 3913 - DNA, 22 bp, Artificial Sequence
  Description of Artificial Sequence: Synthetic oligonucleotide
ttcttcataaacatttctcgga

SEQ ID NO: 3914 - DNA, 22 bp, Artificial Sequence
  Description of Artificial Sequence: Synthetic oligonucleotide
tagaacttggataggaaatcct

SEQ ID NO: 3915 - DNA, 22 bp, Artificial Sequence
  Description of Artificial Sequence: Synthetic oligonucleotide
taattcaatccaatttacagca

SEQ ID NO: 3916 - DNA, 22 bp, Artificial Sequence
  Description of Artificial Sequence: Synthetic oligonucleotide
atttctcattgtaggacatgcg

SEQ ID NO: 3917 - DNA, 22 bp, Artificial Sequence
  Description of Artificial Sequence: Synthetic oligonucleotide
tttctcaatatctgacagggct

SEQ ID NO: 3918 - DNA, 22 bp, Artificial Sequence
  Description of Artificial Sequence: Synthetic oligonucleotide
atattacatcctgtacacagct

SEQ ID NO: 3919 - DNA, 22 bp, Artificial Sequence
  Description of Artificial Sequence: Synthetic oligonucleotide
aatacatatatcacttgaagct

SEQ ID NO: 3920 - DNA, 22 bp, Artificial Sequence
  Description of Artificial Sequence: Synthetic oligonucleotide
ataatacataaggtgaacagga

SEQ ID NO: 3921 - DNA, 22 bp, Artificial Sequence
  Description of Artificial Sequence: Synthetic oligonucleotide
tttaaagaagggtatgttggca

SEQ ID NO: 3922 - DNA, 22 bp, Artificial Sequence
  Description of Artificial Sequence: Synthetic oligonucleotide
attacagtacagatcgattcca

SEQ ID NO: 3923 - DNA, 22 bp, Artificial Sequence
  Description of Artificial Sequence: Synthetic oligonucleotide
ttcccaattaacatgacccggc

SEQ ID NO: 3924 - DNA, 22 bp, Artificial Sequence
  Description of Artificial Sequence: Synthetic oligonucleotide
tatctcattacatttatgccgt

SEQ ID NO: 3925 - DNA, 22 bp, Artificial Sequence
  Description of Artificial Sequence: Synthetic oligonucleotide
tttactcaaatcacaaagacac

SEQ ID NO: 3926 - DNA, 22 bp, Artificial Sequence
  Description of Artificial Sequence: Synthetic oligonucleotide
ataaaccagcctcatttctgca

SEQ ID NO: 3927 - DNA, 22 bp, Artificial Sequence
  Description of Artificial Sequence: Synthetic oligonucleotide
ataattgaggaagtggctagga

SEQ ID NO: 3928 - DNA, 22 bp, Artificial Sequence
  Description of Artificial Sequence: Synthetic oligonucleotide
tttcattgagaaccagtgtgag

SEQ ID NO: 3929 - DNA, 22 bp, Artificial Sequence
  Description of Artificial Sequence: Synthetic oligonucleotide
ttaatggtagaataattgagga

SEQ ID NO: 3930 - DNA, 22 bp, Artificial Sequence
  Description of Artificial Sequence: Synthetic oligonucleotide
ttgatggcgatgaaggtgcgct

SEQ ID NO: 3931 - DNA, 22 bp, Artificial Sequence
  Description of Artificial Sequence: Synthetic oligonucleotide
aacttcatggccacgaggcgga

SEQ ID NO: 3932 - DNA, 22 bp, Artificial Sequence
  Description of Artificial Sequence: Synthetic oligonucleotide
aagaatggtcggtctttcaggt

SEQ ID NO: 3933 - DNA, 22 bp, Artificial Sequence
  Description of Artificial Sequence: Synthetic oligonucleotide
taatatccgcaaatgacttgct

SEQ ID NO: 3934 - DNA, 22 bp, Artificial Sequence
  Description of Artificial Sequence: Synthetic oligonucleotide
ataacagggagtaacaagaggt

SEQ ID NO: 3935 - DNA, 22 bp, Artificial Sequence
  Description of Artificial Sequence: Synthetic oligonucleotide
taggtttatcagtaagctaggg

SEQ ID NO: 3936 - DNA, 22 bp, Artificial Sequence
  Description of Artificial Sequence: Synthetic oligonucleotide
ttacaatatttgaacatctgca

SEQ ID NO: 3937 - DNA, 22 bp, Artificial Sequence
  Description of Artificial Sequence: Synthetic oligonucleotide
aagatctcccagaggatcaccc

SEQ ID NO: 3938 - DNA, 22 bp, Artificial Sequence
  Description of Artificial Sequence: Synthetic oligonucleotide
tttgagagttggaaccatggct

SEQ ID NO: 3939 - DNA, 22 bp, Artificial Sequence
  Description of Artificial Sequence: Synthetic oligonucleotide
atttctccttgttagaggccct

SEQ ID NO: 3940 - DNA, 22 bp, Artificial Sequence
  Description of Artificial Sequence: Synthetic oligonucleotide
ttgggattgggccatcatggcc

SEQ ID NO: 3941 - DNA, 22 bp, Artificial Sequence
  Description of Artificial Sequence: Synthetic oligonucleotide
ttcttaatctgcatgcacaggc

SEQ ID NO: 3942 - DNA, 22 bp, Artificial Sequence
  Description of Artificial Sequence: Synthetic oligonucleotide
ttacaacttggttgtagcggct

SEQ ID NO: 3943 - DNA, 22 bp, Artificial Sequence
  Description of Artificial Sequence: Synthetic oligonucleotide
aatttccagctcaaggtctccc

SEQ ID NO: 3944 - DNA, 22 bp, Artificial Sequence
  Description of Artificial Sequence: Synthetic oligonucleotide
atctaatatgaagatcactggg

SEQ ID NO: 3945 - DNA, 22 bp, Artificial Sequence
  Description of Artificial Sequence: Synthetic oligonucleotide
attcattaagtgtatctgccgg

SEQ ID NO: 3946 - DNA, 22 bp, Artificial Sequence
  Description of Artificial Sequence: Synthetic oligonucleotide
aacagtcacatttctgtcagcc

SEQ ID NO: 3947 - DNA, 22 bp, Artificial Sequence
  Description of Artificial Sequence: Synthetic oligonucleotide
aatgaggttcaatatttctcca

SEQ ID NO: 3948 - DNA, 22 bp, Artificial Sequence
  Description of Artificial Sequence: Synthetic oligonucleotide
tttcctttgtagtcagacaggc

SEQ ID NO: 3949 - DNA, 22 bp, Artificial Sequence
  Description of Artificial Sequence: Synthetic oligonucleotide
ttatctgcagcttgtgcctgca

SEQ ID NO: 3950 - DNA, 22 bp, Artificial Sequence
  Description of Artificial Sequence: Synthetic oligonucleotide
taaataattccctgtggatgca

SEQ ID NO: 3951 - DNA, 22 bp, Artificial Sequence
  Description of Artificial Sequence: Synthetic oligonucleotide
tttgtcttgaatgtctaggccg

SEQ ID NO: 3952 - DNA, 22 bp, Artificial Sequence
  Description of Artificial Sequence: Synthetic oligonucleotide
aataatcagctctttcttgggc

SEQ ID NO: 3953 - DNA, 22 bp, Artificial Sequence
  Description of Artificial Sequence: Synthetic oligonucleotide
atttcgatggccatgatgccca

SEQ ID NO: 3954 - DNA, 22 bp, Artificial Sequence
  Description of Artificial Sequence: Synthetic oligonucleotide
atttcgtatgatccggtcgcgg

SEQ ID NO: 3955 - DNA, 22 bp, Artificial Sequence
  Description of Artificial Sequence: Synthetic oligonucleotide
tttgtctaaagacttggcagca

SEQ ID NO: 3956 - DNA, 22 bp, Artificial Sequence
  Description of Artificial Sequence: Synthetic oligonucleotide
taagaaatcccgaaatattggg

SEQ ID NO: 3957 - DNA, 22 bp, Artificial Sequence
  Description of Artificial Sequence: Synthetic oligonucleotide
ttaacggttactcttcattgct

SEQ ID NO: 3958 - DNA, 22 bp, Artificial Sequence
  Description of Artificial Sequence: Synthetic oligonucleotide
tttgagaacatctagaacagct

SEQ ID NO: 3959 - DNA, 22 bp, Artificial Sequence
  Description of Artificial Sequence: Synthetic oligonucleotide
atatctctatggatcacctggt

SEQ ID NO: 3960 - DNA, 22 bp, Artificial Sequence
  Description of Artificial Sequence: Synthetic oligonucleotide
atagtgcttcgtttactttgct

SEQ ID NO: 3961 - DNA, 22 bp, Artificial Sequence
  Description of Artificial Sequence: Synthetic oligonucleotide
tatatacaacactgaaaccggt

SEQ ID NO: 3962 - DNA, 22 bp, Artificial Sequence
  Description of Artificial Sequence: Synthetic oligonucleotide
atgtgattggaaatagcttcca

SEQ ID NO: 3963 - DNA, 22 bp, Artificial Sequence
  Description of Artificial Sequence: Synthetic oligonucleotide
tttgtaaaggcagagggcaccc

SEQ ID NO: 3964 - DNA, 22 bp, Artificial Sequence
  Description of Artificial Sequence: Synthetic oligonucleotide
tttaaaggtaaagcactcaggc

SEQ ID NO: 3965 - DNA, 22 bp, Artificial Sequence
  Description of Artificial Sequence: Synthetic oligonucleotide
aatgatatcttcattgccggcg

SEQ ID NO: 3966 - DNA, 22 bp, Artificial Sequence
  Description of Artificial Sequence: Synthetic oligonucleotide
ttggtgcttcaaatactagcgc

SEQ ID NO: 3967 - DNA, 22 bp, Artificial Sequence
  Description of Artificial Sequence: Synthetic oligonucleotide
atactgtgagacgttggaggcc

SEQ ID NO: 3968 - DNA, 22 bp, Artificial Sequence
  Description of Artificial Sequence: Synthetic oligonucleotide
atatactgttgcatatgtaccc

SEQ ID NO: 3969 - DNA, 22 bp, Artificial Sequence
  Description of Artificial Sequence: Synthetic oligonucleotide
attaatgaggaggttctgtggt

SEQ ID NO: 3970 - DNA, 22 bp, Artificial Sequence
  Description of Artificial Sequence: Synthetic oligonucleotide
attcaacttcagtgctttgcgt

SEQ ID NO: 3971 - DNA, 22 bp, Artificial Sequence
  Description of Artificial Sequence: Synthetic oligonucleotide
tttaactgccattatttgccca

SEQ ID NO: 3972 - DNA, 22 bp, Artificial Sequence
  Description of Artificial Sequence: Synthetic oligonucleotide
tacaatgcacatattaggtcga

SEQ ID NO: 3973 - DNA, 22 bp, Artificial Sequence
  Description of Artificial Sequence: Synthetic oligonucleotide
tttctggtgctgcttaagaggg

SEQ ID NO: 3974 - DNA, 22 bp, Artificial Sequence
  Description of Artificial Sequence: Synthetic oligonucleotide
aactgcacggcgatgcagaggt

SEQ ID NO: 3975 - DNA, 22 bp, Artificial Sequence
  Description of Artificial Sequence: Synthetic oligonucleotide
tatcttgatctccttgatgcgc

SEQ ID NO: 3976 - DNA, 22 bp, Artificial Sequence
  Description of Artificial Sequence: Synthetic oligonucleotide
ctttattgccagctgttcaggt

SEQ ID NO: 3977 - DNA, 22 bp, Artificial Sequence
  Description of Artificial Sequence: Synthetic oligonucleotide
ataaatctaccgttccctggca

SEQ ID NO: 3978 - DNA, 22 bp, Artificial Sequence
  Description of Artificial Sequence: Synthetic oligonucleotide
ttcctctaacattccttctggc

SEQ ID NO: 3979 - DNA, 22 bp, Artificial Sequence
  Description of Artificial Sequence: Synthetic oligonucleotide
aatcttcaccacagaaggagcc

SEQ ID NO: 3980 - DNA, 22 bp, Artificial Sequence
  Description of Artificial Sequence: Synthetic oligonucleotide
ttaacaccttatgtagacgcct

SEQ ID NO: 3981 - DNA, 22 bp, Artificial Sequence
  Description of Artificial Sequence: Synthetic oligonucleotide
tttgttgtccatgatataggcc

SEQ ID NO: 3982 - DNA, 22 bp, Artificial Sequence
  Description of Artificial Sequence: Synthetic oligonucleotide
ttatagtataagtcatttcgct

SEQ ID NO: 3983 - DNA, 22 bp, Artificial Sequence
  Description of Artificial Sequence: Synthetic oligonucleotide
ttaattagggactgtaaacgcc

SEQ ID NO: 3984 - DNA, 22 bp, Artificial Sequence
  Description of Artificial Sequence: Synthetic oligonucleotide
taatctttgaactggatgtcca

SEQ ID NO: 3985 - DNA, 22 bp, Artificial Sequence
  Description of Artificial Sequence: Synthetic oligonucleotide
atcaataacaacaatcacaggt

SEQ ID NO: 3986 - DNA, 22 bp, Artificial Sequence
  Description of Artificial Sequence: Synthetic oligonucleotide
ttaagacaaatattctacacgg

SEQ ID NO: 3987 - DNA, 22 bp, Artificial Sequence
  Description of Artificial Sequence: Synthetic oligonucleotide
aattcatatgctcatcattgcc

SEQ ID NO: 3988 - DNA, 22 bp, Artificial Sequence
  Description of Artificial Sequence: Synthetic oligonucleotide
atacaatgtcatagagcagcct

SEQ ID NO: 3989 - DNA, 22 bp, Artificial Sequence
  Description of Artificial Sequence: Synthetic oligonucleotide
ttatctgttctgtttcacaggg

SEQ ID NO: 3990 - DNA, 22 bp, Artificial Sequence
  Description of Artificial Sequence: Synthetic oligonucleotide
tttcataatgggccttgtccgc

SEQ ID NO: 3991 - DNA, 22 bp, Artificial Sequence
  Description of Artificial Sequence: Synthetic oligonucleotide
taatcattaggatcttcttgct

SEQ ID NO: 3992 - DNA, 22 bp, Artificial Sequence
  Description of Artificial Sequence: Synthetic oligonucleotide
taatctaacccttgaaggacct

SEQ ID NO: 3993 - DNA, 22 bp, Artificial Sequence
  Description of Artificial Sequence: Synthetic oligonucleotide
attatattcctcaggatttggg

SEQ ID NO: 3994 - DNA, 22 bp, Artificial Sequence
  Description of Artificial Sequence: Synthetic oligonucleotide
taaatactgcaaagccatggcg

SEQ ID NO: 3995 - DNA, 22 bp, Artificial Sequence
  Description of Artificial Sequence: Synthetic oligonucleotide
taatctcttggcattgctggca

SEQ ID NO: 3996 - DNA, 22 bp, Artificial Sequence
  Description of Artificial Sequence: Synthetic oligonucleotide
tttatataaggctgcctcagga

SEQ ID NO: 3997 - DNA, 22 bp, Artificial Sequence
  Description of Artificial Sequence: Synthetic oligonucleotide
attatatatgtctgggagccct

SEQ ID NO: 3998 - DNA, 22 bp, Artificial Sequence
  Description of Artificial Sequence: Synthetic oligonucleotide
tatttacgctactgattgtggc

SEQ ID NO: 3999 - DNA, 22 bp, Artificial Sequence
  Description of Artificial Sequence: Synthetic oligonucleotide
ttaaataacactttaagagcca

SEQ ID NO: 4000 - DNA, 22 bp, Artificial Sequence
  Description of Artificial Sequence: Synthetic oligonucleotide
tataagttagcagttctctgct

SEQ ID NO: 4001 - DNA, 22 bp, Artificial Sequence
  Description of Artificial Sequence: Synthetic oligonucleotide
tttaagtacaactccataggct

SEQ ID NO: 4002 - DNA, 22 bp, Artificial Sequence
  Description of Artificial Sequence: Synthetic oligonucleotide
ttatggcaccagtgaatagcct

SEQ ID NO: 4003 - DNA, 22 bp, Artificial Sequence
  Description of Artificial Sequence: Synthetic oligonucleotide
atatagctatgccgactctgct

SEQ ID NO: 4004 - DNA, 22 bp, Artificial Sequence
  Description of Artificial Sequence: Synthetic oligonucleotide
attctccttgttgttctgtcgt

SEQ ID NO: 4005 - DNA, 22 bp, Artificial Sequence
  Description of Artificial Sequence: Synthetic oligonucleotide
atggaaatagttatacaggcgc

SEQ ID NO: 4006 - DNA, 22 bp, Artificial Sequence
  Description of Artificial Sequence: Synthetic oligonucleotide
aataaagacaaatgaggtggca

SEQ ID NO: 4007 - DNA, 22 bp, Artificial Sequence
  Description of Artificial Sequence: Synthetic oligonucleotide
atttctcacaatgttccatgcc

SEQ ID NO: 4008 - DNA, 22 bp, Artificial Sequence
  Description of Artificial Sequence: Synthetic oligonucleotide
ttaagcatgatattctccggct

SEQ ID NO: 4009 - DNA, 22 bp, Artificial Sequence
  Description of Artificial Sequence: Synthetic oligonucleotide
attaagcatgatattctccggc

SEQ ID NO: 4010 - DNA, 22 bp, Artificial Sequence
  Description of Artificial Sequence: Synthetic oligonucleotide
ataaatcttcgaggtgatcgga

SEQ ID NO: 4011 - DNA, 22 bp, Artificial Sequence
  Description of Artificial Sequence: Synthetic oligonucleotide
cttgaggatctctgaatgggcg

SEQ ID NO: 4012 - DNA, 22 bp, Artificial Sequence
  Description of Artificial Sequence: Synthetic oligonucleotide
tttgatatttaaggtttcagga

SEQ ID NO: 4013 - DNA, 22 bp, Artificial Sequence
  Description of Artificial Sequence: Synthetic oligonucleotide
tttccttcaaatcctcaaaggg

SEQ ID NO: 4014 - DNA, 22 bp, Artificial Sequence
  Description of Artificial Sequence: Synthetic oligonucleotide
tttgtctttgatcctatcagga

SEQ ID NO: 4015 - DNA, 22 bp, Artificial Sequence
  Description of Artificial Sequence: Synthetic oligonucleotide
ttaacatttccctgtgtgccga

SEQ ID NO: 4016 - DNA, 22 bp, Artificial Sequence
  Description of Artificial Sequence: Synthetic oligonucleotide
ataactcatctttaagagcggg

SEQ ID NO: 4017 - DNA, 22 bp, Artificial Sequence
  Description of Artificial Sequence: Synthetic oligonucleotide
tttccacatcgtatgtccagca

SEQ ID NO: 4018 - DNA, 22 bp, Artificial Sequence
  Description of Artificial Sequence: Synthetic oligonucleotide
atactgtaatggctcatctgct

SEQ ID NO: 4019 - DNA, 22 bp, Artificial Sequence
  Description of Artificial Sequence: Synthetic oligonucleotide
atatccatgtcacctccaagga

SEQ ID NO: 4020 - DNA, 22 bp, Artificial Sequence
  Description of Artificial Sequence: Synthetic oligonucleotide
ttctcgtatttgtcgttagcca

SEQ ID NO: 4021 - DNA, 22 bp, Artificial Sequence
  Description of Artificial Sequence: Synthetic oligonucleotide
tttcctttatatgataatgcct

SEQ ID NO: 4022 - DNA, 22 bp, Artificial Sequence
  Description of Artificial Sequence: Synthetic oligonucleotide
ttagcttcttctataaagtcct

SEQ ID NO: 4023 - DNA, 22 bp, Artificial Sequence
  Description of Artificial Sequence: Synthetic oligonucleotide
taaacacttcaggtggacacca

SEQ ID NO: 4024 - DNA, 22 bp, Artificial Sequence
  Description of Artificial Sequence: Synthetic oligonucleotide
tatcgttctcaactggcaagct

SEQ ID NO: 4025 - DNA, 22 bp, Artificial Sequence
  Description of Artificial Sequence: Synthetic oligonucleotide
ttcaacatcattaccactaggt

SEQ ID NO: 4026 - DNA, 22 bp, Artificial Sequence
  Description of Artificial Sequence: Synthetic oligonucleotide
ttgatctgggatgttaataccc

SEQ ID NO: 4027 - DNA, 22 bp, Artificial Sequence
  Description of Artificial Sequence: Synthetic oligonucleotide
ttggacttggacagggacacgg

SEQ ID NO: 4028 - DNA, 22 bp, Artificial Sequence
  Description of Artificial Sequence: Synthetic oligonucleotide
tttgtccatggccttgagggcc

SEQ ID NO: 4029 - DNA, 22 bp, Artificial Sequence
  Description of Artificial Sequence: Synthetic oligonucleotide
ttctttacacagttgctgggcc

SEQ ID NO: 4030 - DNA, 22 bp, Artificial Sequence
  Description of Artificial Sequence: Synthetic oligonucleotide
tttgtctatgacaatcagggct

SEQ ID NO: 4031 - DNA, 22 bp, Artificial Sequence
  Description of Artificial Sequence: Synthetic oligonucleotide
tttcaatggctaagtgtgtggg

SEQ ID NO: 4032 - DNA, 22 bp, Artificial Sequence
  Description of Artificial Sequence: Synthetic oligonucleotide
attaaatagaatcttccaagcc

SEQ ID NO: 4033 - DNA, 22 bp, Artificial Sequence
  Description of Artificial Sequence: Synthetic oligonucleotide
tatttgcacactgggagggcgt

SEQ ID NO: 4034 - DNA, 22 bp, Artificial Sequence
  Description of Artificial Sequence: Synthetic oligonucleotide
ttgagcttcctcagcaggcggg

SEQ ID NO: 4035 - DNA, 22 bp, Artificial Sequence
  Description of Artificial Sequence: Synthetic oligonucleotide
taagcgtatacaacagtgggct

SEQ ID NO: 4036 - DNA, 22 bp, Artificial Sequence
  Description of Artificial Sequence: Synthetic oligonucleotide
tatagaaattgcccagtaaccg

SEQ ID NO: 4037 - DNA, 22 bp, Artificial Sequence
  Description of Artificial Sequence: Synthetic oligonucleotide
taacattagcaggagatgtggg

SEQ ID NO: 4038 - DNA, 22 bp, Artificial Sequence
  Description of Artificial Sequence: Synthetic oligonucleotide
tttaacactgatgaaccaaggc

SEQ ID NO: 4039 - DNA, 22 bp, Artificial Sequence
  Description of Artificial Sequence: Synthetic oligonucleotide
tttctttggcatagtattccga

SEQ ID NO: 4040 - DNA, 22 bp, Artificial Sequence
  Description of Artificial Sequence: Synthetic oligonucleotide
attctgctcggaataggttggt

SEQ ID NO: 4041 - DNA, 22 bp, Artificial Sequence
  Description of Artificial Sequence: Synthetic oligonucleotide
ttaaccgacttctgaacgtgcg

SEQ ID NO: 4042 - DNA, 22 bp, Artificial Sequence
  Description of Artificial Sequence: Synthetic oligonucleotide
atagggaaagatcttgactgcc

SEQ ID NO: 4043 - DNA, 22 bp, Artificial Sequence
  Description of Artificial Sequence: Synthetic oligonucleotide
ttatttctgtactgaactccgt

SEQ ID NO: 4044 - DNA, 22 bp, Artificial Sequence
  Description of Artificial Sequence: Synthetic oligonucleotide
ataaacagggaaacactgtgca

SEQ ID NO: 4045 - DNA, 22 bp, Artificial Sequence
  Description of Artificial Sequence: Synthetic oligonucleotide
atactggatcctcttgataggg

SEQ ID NO: 4046 - DNA, 22 bp, Artificial Sequence
  Description of Artificial Sequence: Synthetic oligonucleotide
tttccttaacaaatatatggct

SEQ ID NO: 4047 - DNA, 22 bp, Artificial Sequence
  Description of Artificial Sequence: Synthetic oligonucleotide
tttacgaagtttatgagatcgc

SEQ ID NO: 4048 - DNA, 22 bp, Artificial Sequence
  Description of Artificial Sequence: Synthetic oligonucleotide
ttctcttgtctttgtatttggt

SEQ ID NO: 4049 - DNA, 22 bp, Artificial Sequence
  Description of Artificial Sequence: Synthetic oligonucleotide
tttctggacgttcttcagtggc

SEQ ID NO: 4050 - DNA, 22 bp, Artificial Sequence
  Description of Artificial Sequence: Synthetic oligonucleotide
ttcaccaatccacttgttcttc

SEQ ID NO: 4051 - DNA, 22 bp, Artificial Sequence
  Description of Artificial Sequence: Synthetic oligonucleotide
tttctttctcataattgatcca

SEQ ID NO: 4052 - DNA, 22 bp, Artificial Sequence
  Description of Artificial Sequence: Synthetic oligonucleotide
tttgccatgtgctctaaacggt

SEQ ID NO: 4053 - DNA, 22 bp, Artificial Sequence
  Description of Artificial Sequence: Synthetic oligonucleotide
atacaggagcccatttactgca

SEQ ID NO: 4054 - DNA, 22 bp, Artificial Sequence
  Description of Artificial Sequence: Synthetic oligonucleotide
atatatcaagaatgccaatgct

SEQ ID NO: 4055 - DNA, 22 bp, Artificial Sequence
  Description of Artificial Sequence: Synthetic oligonucleotide
tttggctaagaatccacttgca

SEQ ID NO: 4056 - DNA, 22 bp, Artificial Sequence
  Description of Artificial Sequence: Synthetic oligonucleotide
ttagacaacaaatccatcaggg

SEQ ID NO: 4057 - DNA, 22 bp, Artificial Sequence
  Description of Artificial Sequence: Synthetic oligonucleotide
attagatttaactgctccacgt

SEQ ID NO: 4058 - DNA, 22 bp, Artificial Sequence
  Description of Artificial Sequence: Synthetic oligonucleotide
atttgctctgaatgaataccgc

SEQ ID NO: 4059 - DNA, 22 bp, Artificial Sequence
  Description of Artificial Sequence: Synthetic oligonucleotide
atctgtgatcagattactacca

SEQ ID NO: 4060 - DNA, 22 bp, Artificial Sequence
  Description of Artificial Sequence: Synthetic oligonucleotide
tttctaatgtcaggtgcatcct

SEQ ID NO: 4061 - DNA, 22 bp, Artificial Sequence
  Description of Artificial Sequence: Synthetic oligonucleotide
tataatacccagaaagtttgga

SEQ ID NO: 4062 - DNA, 22 bp, Artificial Sequence
  Description of Artificial Sequence: Synthetic oligonucleotide
tttgtactaactaaatcttgca

SEQ ID NO: 4063 - DNA, 22 bp, Artificial Sequence
  Description of Artificial Sequence: Synthetic oligonucleotide
attggttagatcagctgaaggc

SEQ ID NO: 4064 - DNA, 22 bp, Artificial Sequence
  Description of Artificial Sequence: Synthetic oligonucleotide
ttaaagcttcagctcgttggct

SEQ ID NO: 4065 - DNA, 22 bp, Artificial Sequence
  Description of Artificial Sequence: Synthetic oligonucleotide
attaagtagctttcactcaggt

SEQ ID NO: 4066 - DNA, 22 bp, Artificial Sequence
  Description of Artificial Sequence: Synthetic oligonucleotide
atatacaagatgacgcccaggc

SEQ ID NO: 4067 - DNA, 22 bp, Artificial Sequence
  Description of Artificial Sequence: Synthetic oligonucleotide
taggatatacaagatgacgccc

SEQ ID NO: 4068 - DNA, 22 bp, Artificial Sequence
  Description of Artificial Sequence: Synthetic oligonucleotide
atatatcaggtctatgttccgg

SEQ ID NO: 4069 - DNA, 22 bp, Artificial Sequence
  Description of Artificial Sequence: Synthetic oligonucleotide
attattgatgttggagactgga

SEQ ID NO: 4070 - DNA, 22 bp, Artificial Sequence
  Description of Artificial Sequence: Synthetic oligonucleotide
tttgtcttggtgcaattgaggt

SEQ ID NO: 4071 - DNA, 22 bp, Artificial Sequence
  Description of Artificial Sequence: Synthetic oligonucleotide
tatcttcatcacttggtgtccc

SEQ ID NO: 4072 - DNA, 22 bp, Artificial Sequence
  Description of Artificial Sequence: Synthetic oligonucleotide
taacataatccacttgaggcgg

SEQ ID NO: 4073 - DNA, 22 bp, Artificial Sequence
  Description of Artificial Sequence: Synthetic oligonucleotide
taattgtaagtgatgaagtcga

SEQ ID NO: 4074 - DNA, 22 bp, Artificial Sequence
  Description of Artificial Sequence: Synthetic oligonucleotide
aatacatataggagattgagga

SEQ ID NO: 4075 - DNA, 22 bp, Artificial Sequence
  Description of Artificial Sequence: Synthetic oligonucleotide
tagatattgcatgcagtctggc

SEQ ID NO: 4076 - DNA, 22 bp, Artificial Sequence
  Description of Artificial Sequence: Synthetic oligonucleotide
attatacaagatactgtttgct

SEQ ID NO: 4077 - DNA, 22 bp, Artificial Sequence
  Description of Artificial Sequence: Synthetic oligonucleotide
atattggtgaatgatcctccgg

SEQ ID NO: 4078 - DNA, 22 bp, Artificial Sequence
  Description of Artificial Sequence: Synthetic oligonucleotide
ataacatctgtgaataagcggc

SEQ ID NO: 4079 - DNA, 22 bp, Artificial Sequence
  Description of Artificial Sequence: Synthetic oligonucleotide
attccttagagcacagactgca

SEQ ID NO: 4080 - DNA, 22 bp, Artificial Sequence
  Description of Artificial Sequence: Synthetic oligonucleotide
ttataaatccagacatcacggc

SEQ ID NO: 4081 - DNA, 22 bp, Artificial Sequence
  Description of Artificial Sequence: Synthetic oligonucleotide
ttaactgtgagttataaatcca

SEQ ID NO: 4082 - DNA, 22 bp, Artificial Sequence
  Description of Artificial Sequence: Synthetic oligonucleotide
aattagcatcattcatttagga

SEQ ID NO: 4083 - DNA, 22 bp, Artificial Sequence
  Description of Artificial Sequence: Synthetic oligonucleotide
aataaatctcttctgatgtggt

SEQ ID NO: 4084 - DNA, 22 bp, Artificial Sequence
  Description of Artificial Sequence: Synthetic oligonucleotide
tttggaaatggtcagaaatcca

SEQ ID NO: 4085 - DNA, 22 bp, Artificial Sequence
  Description of Artificial Sequence: Synthetic oligonucleotide
ttaaattctggcagacttggca

SEQ ID NO: 4086 - DNA, 22 bp, Artificial Sequence
  Description of Artificial Sequence: Synthetic oligonucleotide
tttcctgaggagtgtctctggt

SEQ ID NO: 4087 - DNA, 22 bp, Artificial Sequence
  Description of Artificial Sequence: Synthetic oligonucleotide
atacgctagcagatctgcagct

SEQ ID NO: 4088 - DNA, 22 bp, Artificial Sequence
  Description of Artificial Sequence: Synthetic oligonucleotide
ttaagtggataaggaaagcgct

SEQ ID NO: 4089 - DNA, 22 bp, Artificial Sequence
  Description of Artificial Sequence: Synthetic oligonucleotide
tatgtagttgacacgatctcca

SEQ ID NO: 4090 - DNA, 22 bp, Artificial Sequence
  Description of Artificial Sequence: Synthetic oligonucleotide
taatgtatctaccgtcagggct

SEQ ID NO: 4091 - DNA, 22 bp, Artificial Sequence
  Description of Artificial Sequence: Synthetic oligonucleotide
aagagtttcaagatactctcca

SEQ ID NO: 4092 - DNA, 22 bp, Artificial Sequence
  Description of Artificial Sequence: Synthetic oligonucleotide
attgtatatggaccagtgaccc

SEQ ID NO: 4093 - DNA, 22 bp, Artificial Sequence
  Description of Artificial Sequence: Synthetic oligonucleotide
atgatatatgtcaatgcctcct

SEQ ID NO: 4094 - DNA, 22 bp, Artificial Sequence
  Description of Artificial Sequence: Synthetic oligonucleotide
ttccactcccaggacaggtggt

SEQ ID NO: 4095 - DNA, 22 bp, Artificial Sequence
  Description of Artificial Sequence: Synthetic oligonucleotide
ataaggcttgagtagaactggg

SEQ ID NO: 4096 - DNA, 22 bp, Artificial Sequence
  Description of Artificial Sequence: Synthetic oligonucleotide
tttagtgattctattgctgcca

SEQ ID NO: 4097 - DNA, 22 bp, Artificial Sequence
  Description of Artificial Sequence: Synthetic oligonucleotide
attacctaatgcaattctgcgt

SEQ ID NO: 4098 - DNA, 22 bp, Artificial Sequence
  Description of Artificial Sequence: Synthetic oligonucleotide
attatcacacacttgatcagga

SEQ ID NO: 4099 - DNA, 22 bp, Artificial Sequence
  Description of Artificial Sequence: Synthetic oligonucleotide
tatttgatggaaaggttgtcca

SEQ ID NO: 4100 - DNA, 22 bp, Artificial Sequence
  Description of Artificial Sequence: Synthetic oligonucleotide
taagcatatttgatggaaaggt

SEQ ID NO: 4101 - DNA, 22 bp, Artificial Sequence
  Description of Artificial Sequence: Synthetic oligonucleotide
ttatgtaaatattccaaggcca

SEQ ID NO: 4102 - DNA, 22 bp, Artificial Sequence
  Description of Artificial Sequence: Synthetic oligonucleotide
atttgggagaagatgctgcgca

SEQ ID NO: 4103 - DNA, 22 bp, Artificial Sequence
  Description of Artificial Sequence: Synthetic oligonucleotide
tactgaaatgaacttggcaggg

SEQ ID NO: 4104 - DNA, 22 bp, Artificial Sequence
  Description of Artificial Sequence: Synthetic oligonucleotide
tatgatgatacttctcagaccg

SEQ ID NO: 4105 - DNA, 22 bp, Artificial Sequence
  Description of Artificial Sequence: Synthetic oligonucleotide
atatctcctgggatcatgaggg

SEQ ID NO: 4106 - DNA, 22 bp, Artificial Sequence
  Description of Artificial Sequence: Synthetic oligonucleotide
ttatgcaaccacatctgggcct

SEQ ID NO: 4107 - DNA, 22 bp, Artificial Sequence
  Description of Artificial Sequence: Synthetic oligonucleotide
tttgggtttctctcaaacaggt

SEQ ID NO: 4108 - DNA, 22 bp, Artificial Sequence
  Description of Artificial Sequence: Synthetic oligonucleotide
ttatcaagacatcctctttgca

SEQ ID NO: 4109 - DNA, 22 bp, Artificial Sequence
  Description of Artificial Sequence: Synthetic oligonucleotide
tttgataatcttaccttcagca

SEQ ID NO: 4110 - DNA, 22 bp, Artificial Sequence
  Description of Artificial Sequence: Synthetic oligonucleotide
taatcaggagaaggagaaggca

SEQ ID NO: 4111 - DNA, 22 bp, Artificial Sequence
  Description of Artificial Sequence: Synthetic oligonucleotide
ttagaagtgaatattccttcca

SEQ ID NO: 4112 - DNA, 22 bp, Artificial Sequence
  Description of Artificial Sequence: Synthetic oligonucleotide
atttcctttgctgttcagagga

SEQ ID NO: 4113 - DNA, 22 bp, Artificial Sequence
  Description of Artificial Sequence: Synthetic oligonucleotide
taatttccaaatctgaaagcca

SEQ ID NO: 4114 - DNA, 22 bp, Artificial Sequence
  Description of Artificial Sequence: Synthetic oligonucleotide
atagtgacacatgagaagtggg

SEQ ID NO: 4115 - DNA, 22 bp, Artificial Sequence
  Description of Artificial Sequence: Synthetic oligonucleotide
tttgtaatagcaaatggctgct

SEQ ID NO: 4116 - DNA, 22 bp, Artificial Sequence
  Description of Artificial Sequence: Synthetic oligonucleotide
ataggtgagcactgtggtgcct

SEQ ID NO: 4117 - DNA, 22 bp, Artificial Sequence
  Description of Artificial Sequence: Synthetic oligonucleotide
tttgcaatggcaagaaacagct

SEQ ID NO: 4118 - DNA, 22 bp, Artificial Sequence
  Description of Artificial Sequence: Synthetic oligonucleotide
tttcaattggccttgacacgcc

SEQ ID NO: 4119 - DNA, 22 bp, Artificial Sequence
  Description of Artificial Sequence: Synthetic oligonucleotide
attcttaaacaaccaacttgct

SEQ ID NO: 4120 - DNA, 22 bp, Artificial Sequence
  Description of Artificial Sequence: Synthetic oligonucleotide
taaggttaagacggacaatgcc

SEQ ID NO: 4121 - DNA, 22 bp, Artificial Sequence
  Description of Artificial Sequence: Synthetic oligonucleotide
cagtaaatacagatcaacctct

SEQ ID NO: 4122 - DNA, 22 bp, Artificial Sequence
  Description of Artificial Sequence: Synthetic oligonucleotide
tagagaaagctcctttaatgct

SEQ ID NO: 4123 - DNA, 22 bp, Artificial Sequence
  Description of Artificial Sequence: Synthetic oligonucleotide
tttcttcaccagttcgtatcct

SEQ ID NO: 4124 - DNA, 22 bp, Artificial Sequence
  Description of Artificial Sequence: Synthetic oligonucleotide
aatttggaacaatgtgaatgac

SEQ ID NO: 4125 - DNA, 22 bp, Artificial Sequence
  Description of Artificial Sequence: Synthetic oligonucleotide
atataattcttgtgggagtcct

SEQ ID NO: 4126 - DNA, 22 bp, Artificial Sequence
  Description of Artificial Sequence: Synthetic oligonucleotide
tttccatccgggaatctaggcc

SEQ ID NO: 4127 - DNA, 22 bp, Artificial Sequence
  Description of Artificial Sequence: Synthetic oligonucleotide
tttccacctgtgactactggcc

SEQ ID NO: 4128 - DNA, 22 bp, Artificial Sequence
  Description of Artificial Sequence: Synthetic oligonucleotide
atataaatcgtgaattgctggc

SEQ ID NO: 4129 - DNA, 22 bp, Artificial Sequence
  Description of Artificial Sequence: Synthetic oligonucleotide
taatggtttcatcaagtacttc

SEQ ID NO: 4130 - DNA, 22 bp, Artificial Sequence
  Description of Artificial Sequence: Synthetic oligonucleotide
taacgtacagtgcttcactggc

SEQ ID NO: 4131 - DNA, 22 bp, Artificial Sequence
  Description of Artificial Sequence: Synthetic oligonucleotide
taaaggctccacatttactggc

SEQ ID NO: 4132 - DNA, 22 bp, Artificial Sequence
  Description of Artificial Sequence: Synthetic oligonucleotide
taaggtaatcagatcctgggca

SEQ ID NO: 4133 - DNA, 22 bp, Artificial Sequence
  Description of Artificial Sequence: Synthetic oligonucleotide
ttcaagcaggagaaacttcggc

SEQ ID NO: 4134 - DNA, 22 bp, Artificial Sequence
  Description of Artificial Sequence: Synthetic oligonucleotide
tatggttcaggacctggctgca

SEQ ID NO: 4135 - DNA, 22 bp, Artificial Sequence
  Description of Artificial Sequence: Synthetic oligonucleotide
taaacacacatataaggcagcc

SEQ ID NO: 4136 - DNA, 22 bp, Artificial Sequence
  Description of Artificial Sequence: Synthetic oligonucleotide
ttaataaacagaagcatatgct

SEQ ID NO: 4137 - DNA, 22 bp, Artificial Sequence
  Description of Artificial Sequence: Synthetic oligonucleotide
tttacaaacaaggataacaggt

SEQ ID NO: 4138 - DNA, 22 bp, Artificial Sequence
  Description of Artificial Sequence: Synthetic oligonucleotide
tttcaaggcaagtaacaatgcc

SEQ ID NO: 4139 - DNA, 22 bp, Artificial Sequence
  Description of Artificial Sequence: Synthetic oligonucleotide
aatatggttccagttctgtggt

SEQ ID NO: 4140 - DNA, 22 bp, Artificial Sequence
  Description of Artificial Sequence: Synthetic oligonucleotide
tattctcctgtacaaagaaggc

SEQ ID NO: 4141 - DNA, 22 bp, Artificial Sequence
  Description of Artificial Sequence: Synthetic oligonucleotide
ttgggaaagggcatcctgtggt

SEQ ID NO: 4142 - DNA, 22 bp, Artificial Sequence
  Description of Artificial Sequence: Synthetic oligonucleotide
tcactttgtcctcataagtgcc

SEQ ID NO: 4143 - DNA, 22 bp, Artificial Sequence
  Description of Artificial Sequence: Synthetic oligonucleotide
tatggctaccacttcacgagtg

SEQ ID NO: 4144 - DNA, 22 bp, Artificial Sequence
  Description of Artificial Sequence: Synthetic oligonucleotide
attgcttcctgtacagaagcga

SEQ ID NO: 4145 - DNA, 22 bp, Artificial Sequence
  Description of Artificial Sequence: Synthetic oligonucleotide
ataaacatgaggatgaacagga

SEQ ID NO: 4146 - DNA, 22 bp, Artificial Sequence
  Description of Artificial Sequence: Synthetic oligonucleotide
taatgtacaaataacaagccca

SEQ ID NO: 4147 - DNA, 22 bp, Artificial Sequence
  Description of Artificial Sequence: Synthetic oligonucleotide
tttagggtacaggattaaagga

SEQ ID NO: 4148 - DNA, 22 bp, Artificial Sequence
  Description of Artificial Sequence: Synthetic oligonucleotide
ttaagaggtgaaatacctcggg

SEQ ID NO: 4149 - DNA, 22 bp, Artificial Sequence
  Description of Artificial Sequence: Synthetic oligonucleotide
tttcatggagtgtcacggaggc

SEQ ID NO: 4150 - DNA, 22 bp, Artificial Sequence
  Description of Artificial Sequence: Synthetic oligonucleotide
ataagagatcacaatcttcgta

SEQ ID NO: 4151 - DNA, 22 bp, Artificial Sequence
  Description of Artificial Sequence: Synthetic oligonucleotide
ttactgtacaactggaatgccc

SEQ ID NO: 4152 - DNA, 22 bp, Artificial Sequence
  Description of Artificial Sequence: Synthetic oligonucleotide
tttaatgttgaacaaaccactt

SEQ ID NO: 4153 - DNA, 22 bp, Artificial Sequence
  Description of Artificial Sequence: Synthetic oligonucleotide
tttcctctggctataatttcct

SEQ ID NO: 4154 - DNA, 22 bp, Artificial Sequence
  Description of Artificial Sequence: Synthetic oligonucleotide
ataaaggaagaatctctggcgt

SEQ ID NO: 4155 - DNA, 22 bp, Artificial Sequence
  Description of Artificial Sequence: Synthetic oligonucleotide
attccaaacaccagactgggct

SEQ ID NO: 4156 - DNA, 22 bp, Artificial Sequence
  Description of Artificial Sequence: Synthetic oligonucleotide
atcaatcacatgaatgacagcc

SEQ ID NO: 4157 - DNA, 22 bp, Artificial Sequence
  Description of Artificial Sequence: Synthetic oligonucleotide
atttcctaagaaactcagtgct

SEQ ID NO: 4158 - DNA, 22 bp, Artificial Sequence
  Description of Artificial Sequence: Synthetic oligonucleotide
agatctttgtatatgttggcta

SEQ ID NO: 4159 - DNA, 22 bp, Artificial Sequence
  Description of Artificial Sequence: Synthetic oligonucleotide
ttcggcaataagagtgattgct

SEQ ID NO: 4160 - DNA, 22 bp, Artificial Sequence
  Description of Artificial Sequence: Synthetic oligonucleotide
tataacatccgtgcacacagca

SEQ ID NO: 4161 - DNA, 22 bp, Artificial Sequence
  Description of Artificial Sequence: Synthetic oligonucleotide
ataaagaagattggaggccgca

SEQ ID NO: 4162 - DNA, 22 bp, Artificial Sequence
  Description of Artificial Sequence: Synthetic oligonucleotide
ctgtggaatcacactgtaccgg

SEQ ID NO: 4163 - DNA, 22 bp, Artificial Sequence
  Description of Artificial Sequence: Synthetic oligonucleotide
atatagctgtacatcaatcggc

SEQ ID NO: 4164 - DNA, 22 bp, Artificial Sequence
  Description of Artificial Sequence: Synthetic oligonucleotide
tagaatgttgaatttatgttgg

SEQ ID NO: 4165 - DNA, 22 bp, Artificial Sequence
  Description of Artificial Sequence: Synthetic oligonucleotide
tttctagatctggaagagactt

SEQ ID NO: 4166 - DNA, 22 bp, Artificial Sequence
  Description of Artificial Sequence: Synthetic oligonucleotide
aagtatctccacagaattggat

SEQ ID NO: 4167 - DNA, 22 bp, Artificial Sequence
  Description of Artificial Sequence: Synthetic oligonucleotide
atatggcaacactggagaagcc

SEQ ID NO: 4168 - DNA, 22 bp, Artificial Sequence
  Description of Artificial Sequence: Synthetic oligonucleotide
tttgcttgtgcccttatcagcc

SEQ ID NO: 4169 - DNA, 22 bp, Artificial Sequence
  Description of Artificial Sequence: Synthetic oligonucleotide
ataatctcatacatagagcgca

SEQ ID NO: 4170 - DNA, 22 bp, Artificial Sequence
  Description of Artificial Sequence: Synthetic oligonucleotide
ttaaggttagaaagttcttcca

SEQ ID NO: 4171 - DNA, 22 bp, Artificial Sequence
  Description of Artificial Sequence: Synthetic oligonucleotide
tttggtttcgggatatgaaggc

SEQ ID NO: 4172 - DNA, 22 bp, Artificial Sequence
  Description of Artificial Sequence: Synthetic oligonucleotide
atcatgagtcctcttaggtccc

SEQ ID NO: 4173 - DNA, 22 bp, Artificial Sequence
  Description of Artificial Sequence: Synthetic oligonucleotide
aatagaatcccaatgttctgcg

SEQ ID NO: 4174 - DNA, 22 bp, Artificial Sequence
  Description of Artificial Sequence: Synthetic oligonucleotide
ttaagtctcgatgaagtatcct

SEQ ID NO: 4175 - DNA, 22 bp, Artificial Sequence
  Description of Artificial Sequence: Synthetic oligonucleotide
ataggaatcaaatgcatcagcg

SEQ ID NO: 4176 - DNA, 22 bp, Artificial Sequence
  Description of Artificial Sequence: Synthetic oligonucleotide
attcctgatttctttctctggt

SEQ ID NO: 4177 - DNA, 22 bp, Artificial Sequence
  Description of Artificial Sequence: Synthetic oligonucleotide
atataccaagtgaggagtacct

SEQ ID NO: 4178 - DNA, 22 bp, Artificial Sequence
  Description of Artificial Sequence: Synthetic oligonucleotide
ttatactacctcgataagaggt

SEQ ID NO: 4179 - DNA, 22 bp, Artificial Sequence
  Description of Artificial Sequence: Synthetic oligonucleotide
tatagctgtgctcaactgagcc

SEQ ID NO: 4180 - DNA, 22 bp, Artificial Sequence
  Description of Artificial Sequence: Synthetic oligonucleotide
aattataagctgtatatgccct

SEQ ID NO: 4181 - DNA, 22 bp, Artificial Sequence
  Description of Artificial Sequence: Synthetic oligonucleotide
atacattaattaatgttgccct

SEQ ID NO: 4182 - DNA, 22 bp, Artificial Sequence
  Description of Artificial Sequence: Synthetic oligonucleotide
tttctgttccttgttcggtgca

SEQ ID NO: 4183 - DNA, 22 bp, Artificial Sequence
  Description of Artificial Sequence: Synthetic oligonucleotide
ttccacacccactaagtttggg

SEQ ID NO: 4184 - DNA, 22 bp, Artificial Sequence
  Description of Artificial Sequence: Synthetic oligonucleotide
aatcatgaacagtaattgaggt

SEQ ID NO: 4185 - DNA, 22 bp, Artificial Sequence
  Description of Artificial Sequence: Synthetic oligonucleotide
taagttaaccgcttccctggct

SEQ ID NO: 4186 - DNA, 22 bp, Artificial Sequence
  Description of Artificial Sequence: Synthetic oligonucleotide
ttattccttcaatttgagggaa

SEQ ID NO: 4187 - DNA, 22 bp, Artificial Sequence
  Description of Artificial Sequence: Synthetic oligonucleotide
tacttgctgcagataattactg

SEQ ID NO: 4188 - DNA, 22 bp, Artificial Sequence
  Description of Artificial Sequence: Synthetic oligonucleotide
ttatcccactttgtgtaaccgt

SEQ ID NO: 4189 - DNA, 22 bp, Artificial Sequence
  Description of Artificial Sequence: Synthetic oligonucleotide
ttgattgaagagattaggacaa

SEQ ID NO: 4190 - DNA, 22 bp, Artificial Sequence
  Description of Artificial Sequence: Synthetic oligonucleotide
tatacatgtgggacaacctgct

SEQ ID NO: 4191 - DNA, 22 bp, Artificial Sequence
  Description of Artificial Sequence: Synthetic oligonucleotide
attatcaacaagctctaggccc

SEQ ID NO: 4192 - DNA, 22 bp, Artificial Sequence
  Description of Artificial Sequence: Synthetic oligonucleotide
atctctttaccaaatcttgggc

SEQ ID NO: 4193 - DNA, 22 bp, Artificial Sequence
  Description of Artificial Sequence: Synthetic oligonucleotide
tttctgtgggaaggcaatggct

SEQ ID NO: 4194 - DNA, 22 bp, Artificial Sequence
  Description of Artificial Sequence: Synthetic oligonucleotide
atatgtacagatggcacatggt

SEQ ID NO: 4195 - DNA, 22 bp, Artificial Sequence
  Description of Artificial Sequence: Synthetic oligonucleotide
tttgctaacaaatttcacagcc

SEQ ID NO: 4196 - DNA, 22 bp, Artificial Sequence
  Description of Artificial Sequence: Synthetic oligonucleotide
tgtactgaacattatttcccgc

SEQ ID NO: 4197 - DNA, 22 bp, Artificial Sequence
  Description of Artificial Sequence: Synthetic oligonucleotide
taatagctccaaatgtactgaa

SEQ ID NO: 4198 - DNA, 22 bp, Artificial Sequence
  Description of Artificial Sequence: Synthetic oligonucleotide
tttaaatagacgtccatcacgg

SEQ ID NO: 4199 - DNA, 22 bp, Artificial Sequence
  Description of Artificial Sequence: Synthetic oligonucleotide
tttctttactatagagaaacgg

SEQ ID NO: 4200 - DNA, 22 bp, Artificial Sequence
  Description of Artificial Sequence: Synthetic oligonucleotide
aataactctggaagtgtaggca

SEQ ID NO: 4201 - DNA, 22 bp, Artificial Sequence
  Description of Artificial Sequence: Synthetic oligonucleotide
aatgtaaatgtcattatctggt

SEQ ID NO: 4202 - DNA, 22 bp, Artificial Sequence
  Description of Artificial Sequence: Synthetic oligonucleotide
ttacgagtccatttatttagct

SEQ ID NO: 4203 - DNA, 22 bp, Artificial Sequence
  Description of Artificial Sequence: Synthetic oligonucleotide
tttgtaaatggtgggcagtggg

SEQ ID NO: 4204 - DNA, 22 bp, Artificial Sequence
  Description of Artificial Sequence: Synthetic oligonucleotide
ttgatcagctccttggcctgct

SEQ ID NO: 4205 - DNA, 22 bp, Artificial Sequence
  Description of Artificial Sequence: Synthetic oligonucleotide
ttattgatcagctccttggcct

SEQ ID NO: 4206 - DNA, 22 bp, Artificial Sequence
  Description of Artificial Sequence: Synthetic oligonucleotide
atttcctaggttaataagacca

SEQ ID NO: 4207 - DNA, 22 bp, Artificial Sequence
  Description of Artificial Sequence: Synthetic oligonucleotide
tttcattaatgaattgcaccca

SEQ ID NO: 4208 - DNA, 22 bp, Artificial Sequence
  Description of Artificial Sequence: Synthetic oligonucleotide
tttcagaaggcttgtgtgaggc

SEQ ID NO: 4209 - DNA, 22 bp, Artificial Sequence
  Description of Artificial Sequence: Synthetic oligonucleotide
taaggtattcaggttcctccgt

SEQ ID NO: 4210 - DNA, 22 bp, Artificial Sequence
  Description of Artificial Sequence: Synthetic oligonucleotide
taagttaaggcctatctaccct

SEQ ID NO: 4211 - DNA, 22 bp, Artificial Sequence
  Description of Artificial Sequence: Synthetic oligonucleotide
tataacacaaactcagttacca

SEQ ID NO: 4212 - DNA, 22 bp, Artificial Sequence
  Description of Artificial Sequence: Synthetic oligonucleotide
ttctccaggtaggtgagctgct

SEQ ID NO: 4213 - DNA, 22 bp, Artificial Sequence
  Description of Artificial Sequence: Synthetic oligonucleotide
atttaaggtgccgagaacaggt

SEQ ID NO: 4214 - DNA, 22 bp, Artificial Sequence
  Description of Artificial Sequence: Synthetic oligonucleotide
ttattgccttcgggtgtccgga

SEQ ID NO: 4215 - DNA, 22 bp, Artificial Sequence
  Description of Artificial Sequence: Synthetic oligonucleotide
ttattccaagctgctcctcggg

SEQ ID NO: 4216 - DNA, 22 bp, Artificial Sequence
  Description of Artificial Sequence: Synthetic oligonucleotide
tttccgtcgccttgaggcccgg

SEQ ID NO: 4217 - DNA, 22 bp, Artificial Sequence
  Description of Artificial Sequence: Synthetic oligonucleotide
ttcgtttccgtcgccttgaggc

SEQ ID NO: 4218 - DNA, 22 bp, Artificial Sequence
  Description of Artificial Sequence: Synthetic oligonucleotide
atagccttcaaataaaccttct

SEQ ID NO: 4219 - DNA, 22 bp, Artificial Sequence
  Description of Artificial Sequence: Synthetic oligonucleotide
taatgacgaggtttcaaaggct

SEQ ID NO: 4220 - DNA, 22 bp, Artificial Sequence
  Description of Artificial Sequence: Synthetic oligonucleotide
tttcttcctccctccaagtggc

SEQ ID NO: 4221 - DNA, 22 bp, Artificial Sequence
  Description of Artificial Sequence: Synthetic oligonucleotide
acaaagcatcatcctctagctg

SEQ ID NO: 4222 - DNA, 22 bp, Artificial Sequence
  Description of Artificial Sequence: Synthetic oligonucleotide
tattcctgctgcaagagcagca

SEQ ID NO: 4223 - DNA, 22 bp, Artificial Sequence
  Description of Artificial Sequence: Synthetic oligonucleotide
ttaagacatccaacaagcagct

SEQ ID NO: 4224 - DNA, 22 bp, Artificial Sequence
  Description of Artificial Sequence: Synthetic oligonucleotide
tttagggttgtgttgactaggt

SEQ ID NO: 4225 - DNA, 22 bp, Artificial Sequence
  Description of Artificial Sequence: Synthetic oligonucleotide
tagtagtgggctttagagtggt

SEQ ID NO: 4226 - DNA, 22 bp, Artificial Sequence
  Description of Artificial Sequence: Synthetic oligonucleotide
aaggagctgcacatgctgaggg

SEQ ID NO: 4227 - DNA, 22 bp, Artificial Sequence
  Description of Artificial Sequence: Synthetic oligonucleotide
tatcaattgcatcgtacttggc

SEQ ID NO: 4228 - DNA, 22 bp, Artificial Sequence
  Description of Artificial Sequence: Synthetic oligonucleotide
tttaagaagaagttatacaggt

SEQ ID NO: 4229 - DNA, 22 bp, Artificial Sequence
  Description of Artificial Sequence: Synthetic oligonucleotide
aataactatctcattcaaggca

SEQ ID NO: 4230 - DNA, 22 bp, Artificial Sequence
  Description of Artificial Sequence: Synthetic oligonucleotide
tattccagctcaatcagcagcg

SEQ ID NO: 4231 - DNA, 22 bp, Artificial Sequence
  Description of Artificial Sequence: Synthetic oligonucleotide
aatatagacttcactggttcgt

SEQ ID NO: 4232 - DNA, 22 bp, Artificial Sequence
  Description of Artificial Sequence: Synthetic oligonucleotide
ataaatcctcagatcactcggg

SEQ ID NO: 4233 - DNA, 22 bp, Artificial Sequence
  Description of Artificial Sequence: Synthetic oligonucleotide
ttatctccacaggagacctgct

SEQ ID NO: 4234 - DNA, 22 bp, Artificial Sequence
  Description of Artificial Sequence: Synthetic oligonucleotide
tttcttgatgaccttggctgcc

SEQ ID NO: 4235 - DNA, 22 bp, Artificial Sequence
  Description of Artificial Sequence: Synthetic oligonucleotide
aatctgtacagaataaagtgct

SEQ ID NO: 4236 - DNA, 22 bp, Artificial Sequence
  Description of Artificial Sequence: Synthetic oligonucleotide
ttgtgcatgaagaggatcccgt

SEQ ID NO: 4237 - DNA, 22 bp, Artificial Sequence
  Description of Artificial Sequence: Synthetic oligonucleotide
attaccatgtaaacttgatcct

SEQ ID NO: 4238 - DNA, 22 bp, Artificial Sequence
  Description of Artificial Sequence: Synthetic oligonucleotide
atatgtgatcacaccaagagcc

SEQ ID NO: 4239 - DNA, 22 bp, Artificial Sequence
  Description of Artificial Sequence: Synthetic oligonucleotide
tttgtctataaagtccttcgcc

SEQ ID NO: 4240 - DNA, 22 bp, Artificial Sequence
  Description of Artificial Sequence: Synthetic oligonucleotide
tttctcttgctccacatatgcc

SEQ ID NO: 4241 - DNA, 22 bp, Artificial Sequence
  Description of Artificial Sequence: Synthetic oligonucleotide
aatctctaagaggtcaaggccc

SEQ ID NO: 4242 - DNA, 22 bp, Artificial Sequence
  Description of Artificial Sequence: Synthetic oligonucleotide
aacccataccaggagcttccgg

SEQ ID NO: 4243 - DNA, 22 bp, Artificial Sequence
  Description of Artificial Sequence: Synthetic oligonucleotide
ttcccatgtggctgactaggcc

SEQ ID NO: 4244 - DNA, 22 bp, Artificial Sequence
  Description of Artificial Sequence: Synthetic oligonucleotide
ttcagctttgaaggtaggtggg

SEQ ID NO: 4245 - DNA, 22 bp, Artificial Sequence
  Description of Artificial Sequence: Synthetic oligonucleotide
atttggctgcatgcagtagggc

SEQ ID NO: 4246 - DNA, 22 bp, Artificial Sequence
  Description of Artificial Sequence: Synthetic oligonucleotide
ataaataaccagcaaagtacca

SEQ ID NO: 4247 - DNA, 22 bp, Artificial Sequence
  Description of Artificial Sequence: Synthetic oligonucleotide
ttacatcctcaatctcatctct

SEQ ID NO: 4248 - DNA, 22 bp, Artificial Sequence
  Description of Artificial Sequence: Synthetic oligonucleotide
atctatttccagatgatgcgcc

SEQ ID NO: 4249 - DNA, 22 bp, Artificial Sequence
  Description of Artificial Sequence: Synthetic oligonucleotide
ttctataatcctaaagaacctt

SEQ ID NO: 4250 - DNA, 22 bp, Artificial Sequence
  Description of Artificial Sequence: Synthetic oligonucleotide
aatttctattattgatgccggt

SEQ ID NO: 4251 - DNA, 22 bp, Artificial Sequence
  Description of Artificial Sequence: Synthetic oligonucleotide
atgtgctatgagtaaagtgcat

SEQ ID NO: 4252 - DNA, 22 bp, Artificial Sequence
  Description of Artificial Sequence: Synthetic oligonucleotide
atgtgtaaagagaaccaatcac

SEQ ID NO: 4253 - DNA, 22 bp, Artificial Sequence
  Description of Artificial Sequence: Synthetic oligonucleotide
ttctcaggtctatctgcagcgg

SEQ ID NO: 4254 - DNA, 22 bp, Artificial Sequence
  Description of Artificial Sequence: Synthetic oligonucleotide
attacggttgatgccggtgctc

SEQ ID NO: 4255 - DNA, 22 bp, Artificial Sequence
  Description of Artificial Sequence: Synthetic oligonucleotide
aattccattgcaaatttctggg

SEQ ID NO: 4256 - DNA, 22 bp, Artificial Sequence
  Description of Artificial Sequence: Synthetic oligonucleotide
atatcataactggcaaagtccc

SEQ ID NO: 4257 - DNA, 22 bp, Artificial Sequence
  Description of Artificial Sequence: Synthetic oligonucleotide
agtacaaatgaagtcaatggtg

SEQ ID NO: 4258 - DNA, 22 bp, Artificial Sequence
  Description of Artificial Sequence: Synthetic oligonucleotide
tattctatatgcttcttctggg

SEQ ID NO: 4259 - DNA, 22 bp, Artificial Sequence
  Description of Artificial Sequence: Synthetic oligonucleotide
ttcttgtagcataggattaggg

SEQ ID NO: 4260 - DNA, 22 bp, Artificial Sequence
  Description of Artificial Sequence: Synthetic oligonucleotide
atcaaatcccattcgtatagct

SEQ ID NO: 4261 - DNA, 22 bp, Artificial Sequence
  Description of Artificial Sequence: Synthetic oligonucleotide
ttgcttgaaatcaataaccgcg

SEQ ID NO: 4262 - DNA, 22 bp, Artificial Sequence
  Description of Artificial Sequence: Synthetic oligonucleotide
tttctgaaatcgattctgcggt

SEQ ID NO: 4263 - DNA, 22 bp, Artificial Sequence
  Description of Artificial Sequence: Synthetic oligonucleotide
tacactttgatatttgtttggc

SEQ ID NO: 4264 - DNA, 22 bp, Artificial Sequence
  Description of Artificial Sequence: Synthetic oligonucleotide
atttcggatgatgatgcatcca

SEQ ID NO: 4265 - DNA, 22 bp, Artificial Sequence
  Description of Artificial Sequence: Synthetic oligonucleotide
ttacaatatttgtatggctgct

SEQ ID NO: 4266 - DNA, 22 bp, Artificial Sequence
  Description of Artificial Sequence: Synthetic oligonucleotide
ttatacaaagctaaacactgcc

SEQ ID NO: 4267 - DNA, 22 bp, Artificial Sequence
  Description of Artificial Sequence: Synthetic oligonucleotide
ttaactcttcatcaagtggccg

SEQ ID NO: 4268 - DNA, 22 bp, Artificial Sequence
  Description of Artificial Sequence: Synthetic oligonucleotide
ttatccttctataataccactg

SEQ ID NO: 4269 - DNA, 22 bp, Artificial Sequence
  Description of Artificial Sequence: Synthetic oligonucleotide
atatctactagcactagtgccc

SEQ ID NO: 4270 - DNA, 22 bp, Artificial Sequence
  Description of Artificial Sequence: Synthetic oligonucleotide
ttcaggtcacccagctgttggt

SEQ ID NO: 4271 - DNA, 22 bp, Artificial Sequence
  Description of Artificial Sequence: Synthetic oligonucleotide
ttctagaatgatctgggcagtg

SEQ ID NO: 4272 - DNA, 22 bp, Artificial Sequence
  Description of Artificial Sequence: Synthetic oligonucleotide
ctgaccatgcatggtaaagggc

SEQ ID NO: 4273 - DNA, 22 bp, Artificial Sequence
  Description of Artificial Sequence: Synthetic oligonucleotide
ttcttaccacagagtaggtgtg

SEQ ID NO: 4274 - DNA, 22 bp, Artificial Sequence
  Description of Artificial Sequence: Synthetic oligonucleotide
taaataaataaggaccagccct

SEQ ID NO: 4275 - DNA, 22 bp, Artificial Sequence
  Description of Artificial Sequence: Synthetic oligonucleotide
atttcaattccgttctcttggt

SEQ ID NO: 4276 - DNA, 22 bp, Artificial Sequence
  Description of Artificial Sequence: Synthetic oligonucleotide
tttgatctgccaatgatatggc

SEQ ID NO: 4277 - DNA, 22 bp, Artificial Sequence
  Description of Artificial Sequence: Synthetic oligonucleotide
tatttctcccaaagaaactggt

SEQ ID NO: 4278 - DNA, 22 bp, Artificial Sequence
  Description of Artificial Sequence: Synthetic oligonucleotide
ttaccatcagaacttgtgagga

SEQ ID NO: 4279 - DNA, 22 bp, Artificial Sequence
  Description of Artificial Sequence: Synthetic oligonucleotide
tttctaatgcatatgaccaccc

SEQ ID NO: 4280 - DNA, 22 bp, Artificial Sequence
  Description of Artificial Sequence: Synthetic oligonucleotide
atattcatggagaatagcagga

SEQ ID NO: 4281 - DNA, 22 bp, Artificial Sequence
  Description of Artificial Sequence: Synthetic oligonucleotide
tttccgcaggtagcgctgcgcc

SEQ ID NO: 4282 - DNA, 22 bp, Artificial Sequence
  Description of Artificial Sequence: Synthetic oligonucleotide
tttccaaagcttggactgaggg

SEQ ID NO: 4283 - DNA, 22 bp, Artificial Sequence
  Description of Artificial Sequence: Synthetic oligonucleotide
tttattctgcaaaggtgggcgc

SEQ ID NO: 4284 - DNA, 22 bp, Artificial Sequence
  Description of Artificial Sequence: Synthetic oligonucleotide
ataagaatacagtgtcagcgcc

SEQ ID NO: 4285 - DNA, 22 bp, Artificial Sequence
  Description of Artificial Sequence: Synthetic oligonucleotide
attcattatgaacctagaggca

SEQ ID NO: 4286 - DNA, 22 bp, Artificial Sequence
  Description of Artificial Sequence: Synthetic oligonucleotide
atatagcaacatacacactggg

SEQ ID NO: 4287 - DNA, 22 bp, Artificial Sequence
  Description of Artificial Sequence: Synthetic oligonucleotide
atttccctggagcttctgggca

SEQ ID NO: 4288 - DNA, 22 bp, Artificial Sequence
  Description of Artificial Sequence: Synthetic oligonucleotide
ttgctgaacagcagcagcaggg

SEQ ID NO: 4289 - DNA, 22 bp, Artificial Sequence
  Description of Artificial Sequence: Synthetic oligonucleotide
ttcttcagggaatctatgaggc

SEQ ID NO: 4290 - DNA, 22 bp, Artificial Sequence
  Description of Artificial Sequence: Synthetic oligonucleotide
ttcaccagcagttctgggaggc

SEQ ID NO: 4291 - DNA, 22 bp, Artificial Sequence
  Description of Artificial Sequence: Synthetic oligonucleotide
tttcgggagctgcttcagtgcc

SEQ ID NO: 4292 - DNA, 22 bp, Artificial Sequence
  Description of Artificial Sequence: Synthetic oligonucleotide
tttatagccggtggccgggccg

SEQ ID NO: 4293 - DNA, 22 bp, Artificial Sequence
  Description of Artificial Sequence: Synthetic oligonucleotide
tattgctttcagcatagatcca

SEQ ID NO: 4294 - DNA, 22 bp, Artificial Sequence
  Description of Artificial Sequence: Synthetic oligonucleotide
tttgtgattccacttgggtcca

SEQ ID NO: 4295 - DNA, 22 bp, Artificial Sequence
  Description of Artificial Sequence: Synthetic oligonucleotide
tttatactaagttgattctggg

SEQ ID NO: 4296 - DNA, 22 bp, Artificial Sequence
  Description of Artificial Sequence: Synthetic oligonucleotide
tatttcatttgcatgtattcct

SEQ ID NO: 4297 - DNA, 22 bp, Artificial Sequence
  Description of Artificial Sequence: Synthetic oligonucleotide
taagcttatcaagttcactcgt

SEQ ID NO: 4298 - DNA, 22 bp, Artificial Sequence
  Description of Artificial Sequence: Synthetic oligonucleotide
ttaacctcttcttctaactgct

SEQ ID NO: 4299 - DNA, 22 bp, Artificial Sequence
  Description of Artificial Sequence: Synthetic oligonucleotide
aatctttcacatctattgagga

SEQ ID NO: 4300 - DNA, 22 bp, Artificial Sequence
  Description of Artificial Sequence: Synthetic oligonucleotide
tttctgatgacctttacagcca

SEQ ID NO: 4301 - DNA, 22 bp, Artificial Sequence
  Description of Artificial Sequence: Synthetic oligonucleotide
attccacaggatgaaggagcca

SEQ ID NO: 4302 - DNA, 22 bp, Artificial Sequence
  Description of Artificial Sequence: Synthetic oligonucleotide
ctgctcagggacacaaggtgcc

SEQ ID NO: 4303 - DNA, 22 bp, Artificial Sequence
  Description of Artificial Sequence: Synthetic oligonucleotide
ttctgacatcactaattctgct

SEQ ID NO: 4304 - DNA, 22 bp, Artificial Sequence
  Description of Artificial Sequence: Synthetic oligonucleotide
aattgcatacagcaagagacgt

SEQ ID NO: 4305 - DNA, 22 bp, Artificial Sequence
  Description of Artificial Sequence: Synthetic oligonucleotide
taatgactgcatgtgactgcgg

SEQ ID NO: 4306 - DNA, 22 bp, Artificial Sequence
  Description of Artificial Sequence: Synthetic oligonucleotide
atacattcaacttcaaataggc

SEQ ID NO: 4307 - DNA, 22 bp, Artificial Sequence
  Description of Artificial Sequence: Synthetic oligonucleotide
tttaattctgttaagatgtcca

SEQ ID NO: 4308 - DNA, 22 bp, Artificial Sequence
  Description of Artificial Sequence: Synthetic oligonucleotide
tttaaattccgcttactctggg

SEQ ID NO: 4309 - DNA, 22 bp, Artificial Sequence
  Description of Artificial Sequence: Synthetic oligonucleotide
gttgtcccgaagtgcctgggct

SEQ ID NO: 4310 - DNA, 22 bp, Artificial Sequence
  Description of Artificial Sequence: Synthetic oligonucleotide
taaagtaagtaagtatgcaggt

SEQ ID NO: 4311 - DNA, 22 bp, Artificial Sequence
  Description of Artificial Sequence: Synthetic oligonucleotide
atttcatacagttcatccaggc

SEQ ID NO: 4312 - DNA, 22 bp, Artificial Sequence
  Description of Artificial Sequence: Synthetic oligonucleotide
ttacgatcacggacaggagcca

SEQ ID NO: 4313 - DNA, 22 bp, Artificial Sequence
  Description of Artificial Sequence: Synthetic oligonucleotide
atgtcttggaacatattcacca

SEQ ID NO: 4314 - DNA, 22 bp, Artificial Sequence
  Description of Artificial Sequence: Synthetic oligonucleotide
ttaggagacgggtgattctccc

SEQ ID NO: 4315 - DNA, 22 bp, Artificial Sequence
  Description of Artificial Sequence: Synthetic oligonucleotide
gatgtacttctcactctcagcc

SEQ ID NO: 4316 - DNA, 22 bp, Artificial Sequence
  Description of Artificial Sequence: Synthetic oligonucleotide
tgtttgtacaaggttgaggcat

SEQ ID NO: 4317 - DNA, 22 bp, Artificial Sequence
  Description of Artificial Sequence: Synthetic oligonucleotide
taatactgtctctctgagtccg

SEQ ID NO: 4318 - DNA, 22 bp, Artificial Sequence
  Description of Artificial Sequence: Synthetic oligonucleotide
atccctgtacgtgcagttgccc

SEQ ID NO: 4319 - DNA, 22 bp, Artificial Sequence
  Description of Artificial Sequence: Synthetic oligonucleotide
ttagttaagggcatgggtactt

SEQ ID NO: 4320 - DNA, 22 bp, Artificial Sequence
  Description of Artificial Sequence: Synthetic oligonucleotide
atttctggtgtcgtttagtcct

SEQ ID NO: 4321 - DNA, 22 bp, Artificial Sequence
  Description of Artificial Sequence: Synthetic oligonucleotide
tttaaatcggaaatgccaacgg

SEQ ID NO: 4322 - DNA, 22 bp, Artificial Sequence
  Description of Artificial Sequence: Synthetic oligonucleotide
ttgactacagtccctttgcgtg

SEQ ID NO: 4323 - DNA, 22 bp, Artificial Sequence
  Description of Artificial Sequence: Synthetic oligonucleotide
ttgtgctttcaactgttctgca

SEQ ID NO: 4324 - DNA, 22 bp, Artificial Sequence
  Description of Artificial Sequence: Synthetic oligonucleotide
tttacagaaggctccagtaggg

SEQ ID NO: 4325 - DNA, 22 bp, Artificial Sequence
  Description of Artificial Sequence: Synthetic oligonucleotide
tatgggtaaacttgactttctt

SEQ ID NO: 4326 - DNA, 22 bp, Artificial Sequence
  Description of Artificial Sequence: Synthetic oligonucleotide
taaattcaagggataatgccca

SEQ ID NO: 4327 - DNA, 22 bp, Artificial Sequence
  Description of Artificial Sequence: Synthetic oligonucleotide
tacacgtaggagacgatctggt

SEQ ID NO: 4328 - DNA, 22 bp, Artificial Sequence
  Description of Artificial Sequence: Synthetic oligonucleotide
ttgatccaaaccatgagggcct

SEQ ID NO: 4329 - DNA, 22 bp, Artificial Sequence
  Description of Artificial Sequence: Synthetic oligonucleotide
atggtcaaagagcttgtgcggc

SEQ ID NO: 4330 - DNA, 22 bp, Artificial Sequence
  Description of Artificial Sequence: Synthetic oligonucleotide
atctatgatgtgtctctctgca

SEQ ID NO: 4331 - DNA, 22 bp, Artificial Sequence
  Description of Artificial Sequence: Synthetic oligonucleotide
ataggtgttaacttaacaaggc

SEQ ID NO: 4332 - DNA, 22 bp, Artificial Sequence
  Description of Artificial Sequence: Synthetic oligonucleotide
atgaatttggtgactggaccgt

SEQ ID NO: 4333 - DNA, 22 bp, Artificial Sequence
  Description of Artificial Sequence: Synthetic oligonucleotide
gtaaggtagtcccgggtgagca

SEQ ID NO: 4334 - DNA, 22 bp, Artificial Sequence
  Description of Artificial Sequence: Synthetic oligonucleotide
tatttgcaggagatgcaatctc

SEQ ID NO: 4335 - DNA, 22 bp, Artificial Sequence
  Description of Artificial Sequence: Synthetic oligonucleotide
atatagtatcaagtgaagtcgg

SEQ ID NO: 4336 - DNA, 22 bp, Artificial Sequence
  Description of Artificial Sequence: Synthetic oligonucleotide
gataaccagaagtgagccgggc

SEQ ID NO: 4337 - DNA, 22 bp, Artificial Sequence
  Description of Artificial Sequence: Synthetic oligonucleotide
ttgttgacccatttcatcagca

SEQ ID NO: 4338 - DNA, 22 bp, Artificial Sequence
  Description of Artificial Sequence: Synthetic oligonucleotide
aatcacccatatattatgtcca

SEQ ID NO: 4339 - DNA, 22 bp, Artificial Sequence
  Description of Artificial Sequence: Synthetic oligonucleotide
atatcatctaggaggctgaggc

SEQ ID NO: 4340 - DNA, 22 bp, Artificial Sequence
  Description of Artificial Sequence: Synthetic oligonucleotide
taagaaatagagaaactttcca

SEQ ID NO: 4341 - DNA, 22 bp, Artificial Sequence
  Description of Artificial Sequence: Synthetic oligonucleotide
ataagagatcagaggtttaggc

SEQ ID NO: 4342 - DNA, 22 bp, Artificial Sequence
  Description of Artificial Sequence: Synthetic oligonucleotide
aatttggttcttcaaagctgga

SEQ ID NO: 4343 - DNA, 22 bp, Artificial Sequence
  Description of Artificial Sequence: Synthetic oligonucleotide
tttcatggtagcttaatttggt

SEQ ID NO: 4344 - DNA, 22 bp, Artificial Sequence
  Description of Artificial Sequence: Synthetic oligonucleotide
atatttcttacagagagctgcc

SEQ ID NO: 4345 - DNA, 22 bp, Artificial Sequence
  Description of Artificial Sequence: Synthetic oligonucleotide
tttatatatacctttcatcctt

SEQ ID NO: 4346 - DNA, 22 bp, Artificial Sequence
  Description of Artificial Sequence: Synthetic oligonucleotide
atcagtgggcagctcatggcgg

SEQ ID NO: 4347 - DNA, 22 bp, Artificial Sequence
  Description of Artificial Sequence: Synthetic oligonucleotide
taatgattcagagtgcagaggg

SEQ ID NO: 4348 - DNA, 22 bp, Artificial Sequence
  Description of Artificial Sequence: Synthetic oligonucleotide
tttaaacagctacaaagcgcca

SEQ ID NO: 4349 - DNA, 22 bp, Artificial Sequence
  Description of Artificial Sequence: Synthetic oligonucleotide
ttgttctacccactaaagagca

SEQ ID NO: 4350 - DNA, 22 bp, Artificial Sequence
  Description of Artificial Sequence: Synthetic oligonucleotide
ttgacggtaaataacgtctgct

SEQ ID NO: 4351 - DNA, 22 bp, Artificial Sequence
  Description of Artificial Sequence: Synthetic oligonucleotide
atgttaatatcaaggagcagct

SEQ ID NO: 4352 - DNA, 22 bp, Artificial Sequence
  Description of Artificial Sequence: Synthetic oligonucleotide
tttatacataagtaaacgtgtc

SEQ ID NO: 4353 - DNA, 22 bp, Artificial Sequence
  Description of Artificial Sequence: Synthetic oligonucleotide
ttattctctcaatgctgagcta

SEQ ID NO: 4354 - DNA, 22 bp, Artificial Sequence
  Description of Artificial Sequence: Synthetic oligonucleotide
ttatctccagtgtgtattacca

SEQ ID NO: 4355 - DNA, 22 bp, Artificial Sequence
  Description of Artificial Sequence: Synthetic oligonucleotide
aattaaggacagtcaaactgcc

SEQ ID NO: 4356 - DNA, 22 bp, Artificial Sequence
  Description of Artificial Sequence: Synthetic oligonucleotide
ttctgtaaagccagtatcacca

SEQ ID NO: 4357 - DNA, 22 bp, Artificial Sequence
  Description of Artificial Sequence: Synthetic oligonucleotide
ttaaccgggaaggacggtgcgg

SEQ ID NO: 4358 - DNA, 22 bp, Artificial Sequence
  Description of Artificial Sequence: Synthetic oligonucleotide
tttattaaccgggaaggacggt

SEQ ID NO: 4359 - DNA, 22 bp, Artificial Sequence
  Description of Artificial Sequence: Synthetic oligonucleotide
ataccatttggcgttatccttg

SEQ ID NO: 4360 - DNA, 22 bp, Artificial Sequence
  Description of Artificial Sequence: Synthetic oligonucleotide
ttatagcaagttgtaataggca

SEQ ID NO: 4361 - DNA, 22 bp, Artificial Sequence
  Description of Artificial Sequence: Synthetic oligonucleotide
atgtacctccacaagagcaggt

SEQ ID NO: 4362 - DNA, 22 bp, Artificial Sequence
  Description of Artificial Sequence: Synthetic oligonucleotide
atatagcaacatctaatccgga

SEQ ID NO: 4363 - DNA, 22 bp, Artificial Sequence
  Description of Artificial Sequence: Synthetic oligonucleotide
atacatcataaatgacatggca

SEQ ID NO: 4364 - DNA, 22 bp, Artificial Sequence
  Description of Artificial Sequence: Synthetic oligonucleotide
aaccaatattcactgaaggctg

SEQ ID NO: 4365 - DNA, 22 bp, Artificial Sequence
  Description of Artificial Sequence: Synthetic oligonucleotide
tttaaagaactcatatttggca

SEQ ID NO: 4366 - DNA, 22 bp, Artificial Sequence
  Description of Artificial Sequence: Synthetic oligonucleotide
agatctgtaaatcttgtgtggc

SEQ ID NO: 4367 - DNA, 22 bp, Artificial Sequence
  Description of Artificial Sequence: Synthetic oligonucleotide
gtttaataagtcacttctggct

SEQ ID NO: 4368 - DNA, 22 bp, Artificial Sequence
  Description of Artificial Sequence: Synthetic oligonucleotide
ttgtgctttgtgctgttctgcg

SEQ ID NO: 4369 - DNA, 22 bp, Artificial Sequence
  Description of Artificial Sequence: Synthetic oligonucleotide
tttcagtttctttctagtcgct

SEQ ID NO: 4370 - DNA, 22 bp, Artificial Sequence
  Description of Artificial Sequence: Synthetic oligonucleotide
tttgtccatgactcattgacag

SEQ ID NO: 4371 - DNA, 22 bp, Artificial Sequence
  Description of Artificial Sequence: Synthetic oligonucleotide
ataatgtttcaacttgcaagga

SEQ ID NO: 4372 - DNA, 22 bp, Artificial Sequence
  Description of Artificial Sequence: Synthetic oligonucleotide
tttccatttcagatgacatccg

SEQ ID NO: 4373 - DNA, 22 bp, Artificial Sequence
  Description of Artificial Sequence: Synthetic oligonucleotide
atttcacatccagccattggct

SEQ ID NO: 4374 - DNA, 22 bp, Artificial Sequence
  Description of Artificial Sequence: Synthetic oligonucleotide
tttatgtatgtatggctgagca

SEQ ID NO: 4375 - DNA, 22 bp, Artificial Sequence
  Description of Artificial Sequence: Synthetic oligonucleotide
attctctttattcatcttcgca

SEQ ID NO: 4376 - DNA, 22 bp, Artificial Sequence
  Description of Artificial Sequence: Synthetic oligonucleotide
ttggcctataaaggaacaaggt

SEQ ID NO: 4377 - DNA, 22 bp, Artificial Sequence
  Description of Artificial Sequence: Synthetic oligonucleotide
tttaaagatacgagatcccgct

SEQ ID NO: 4378 - DNA, 22 bp, Artificial Sequence
  Description of Artificial Sequence: Synthetic oligonucleotide
atatctgtgcagggcccaagcc

SEQ ID NO: 4379 - DNA, 22 bp, Artificial Sequence
  Description of Artificial Sequence: Synthetic oligonucleotide
tattatctcaattcgtcctggc

SEQ ID NO: 4380 - DNA, 22 bp, Artificial Sequence
  Description of Artificial Sequence: Synthetic oligonucleotide
ttaaagattggcttcttccgca

SEQ ID NO: 4381 - DNA, 22 bp, Artificial Sequence
  Description of Artificial Sequence: Synthetic oligonucleotide
ttacaaactgaaggaagcaggt

SEQ ID NO: 4382 - DNA, 22 bp, Artificial Sequence
  Description of Artificial Sequence: Synthetic oligonucleotide
ttgcagatgtagcttctgtcct

SEQ ID NO: 4383 - DNA, 22 bp, Artificial Sequence
  Description of Artificial Sequence: Synthetic oligonucleotide
atttaccacctcagtaactcca

SEQ ID NO: 4384 - DNA, 22 bp, Artificial Sequence
  Description of Artificial Sequence: Synthetic oligonucleotide
tatatttgccagtctgacaggc

SEQ ID NO: 4385 - DNA, 22 bp, Artificial Sequence
  Description of Artificial Sequence: Synthetic oligonucleotide
taataacttcaagtacattgca

SEQ ID NO: 4386 - DNA, 22 bp, Artificial Sequence
  Description of Artificial Sequence: Synthetic oligonucleotide
ttccctgataatgaaatctgga

SEQ ID NO: 4387 - DNA, 22 bp, Artificial Sequence
  Description of Artificial Sequence: Synthetic oligonucleotide
ttgatgggtgggagaatgaggc

SEQ ID NO: 4388 - DNA, 22 bp, Artificial Sequence
  Description of Artificial Sequence: Synthetic oligonucleotide
aatttccttcagaatgttggcg

SEQ ID NO: 4389 - DNA, 22 bp, Artificial Sequence
  Description of Artificial Sequence: Synthetic oligonucleotide
taaccaattgcactgaagaggt

SEQ ID NO: 4390 - DNA, 22 bp, Artificial Sequence
  Description of Artificial Sequence: Synthetic oligonucleotide
atactctatgattccttgtgcc

SEQ ID NO: 4391 - DNA, 22 bp, Artificial Sequence
  Description of Artificial Sequence: Synthetic oligonucleotide
attatccatcacaggcgttggt

SEQ ID NO: 4392 - DNA, 22 bp, Artificial Sequence
  Description of Artificial Sequence: Synthetic oligonucleotide
tatattatgcatccaagagccc

SEQ ID NO: 4393 - DNA, 22 bp, Artificial Sequence
  Description of Artificial Sequence: Synthetic oligonucleotide
tataagatactcgtttccagct

SEQ ID NO: 4394 - DNA, 22 bp, Artificial Sequence
  Description of Artificial Sequence: Synthetic oligonucleotide
aatcctgagactaaatcttggc

SEQ ID NO: 4395 - DNA, 22 bp, Artificial Sequence
  Description of Artificial Sequence: Synthetic oligonucleotide
ttctctcccagggtggctaggt

SEQ ID NO: 4396 - DNA, 22 bp, Artificial Sequence
  Description of Artificial Sequence: Synthetic oligonucleotide
ttctgttctctcccagggtggc

SEQ ID NO: 4397 - DNA, 22 bp, Artificial Sequence
  Description of Artificial Sequence: Synthetic oligonucleotide
tttatcttggtctcgcagtgca

SEQ ID NO: 4398 - DNA, 22 bp, Artificial Sequence
  Description of Artificial Sequence: Synthetic oligonucleotide
taaaggtggaaggcgatgagga

SEQ ID NO: 4399 - DNA, 22 bp, Artificial Sequence
  Description of Artificial Sequence: Synthetic oligonucleotide
taaatgttccagttgttctcga

SEQ ID NO: 4400 - DNA, 22 bp, Artificial Sequence
  Description of Artificial Sequence: Synthetic oligonucleotide
ttctttgatctggcccttggcg

SEQ ID NO: 4401 - DNA, 22 bp, Artificial Sequence
  Description of Artificial Sequence: Synthetic oligonucleotide
ttatataaggcagagttcacca

SEQ ID NO: 4402 - DNA, 22 bp, Artificial Sequence
  Description of Artificial Sequence: Synthetic oligonucleotide
ttcttacagcaaacactgaggt

SEQ ID NO: 4403 - DNA, 22 bp, Artificial Sequence
  Description of Artificial Sequence: Synthetic oligonucleotide
tttaggatagactggcagtgct

SEQ ID NO: 4404 - DNA, 22 bp, Artificial Sequence
  Description of Artificial Sequence: Synthetic oligonucleotide
ataatcattcatccagttgcca

SEQ ID NO: 4405 - DNA, 22 bp, Artificial Sequence
  Description of Artificial Sequence: Synthetic oligonucleotide
tttcaatatctgccagcatggt

SEQ ID NO: 4406 - DNA, 22 bp, Artificial Sequence
  Description of Artificial Sequence: Synthetic oligonucleotide
ttggaaagtggatgagagaggc

SEQ ID NO: 4407 - DNA, 22 bp, Artificial Sequence
  Description of Artificial Sequence: Synthetic oligonucleotide
attacttgatctactgctcggt

SEQ ID NO: 4408 - DNA, 22 bp, Artificial Sequence
  Description of Artificial Sequence: Synthetic oligonucleotide
taaattgctgcagttaattggt

SEQ ID NO: 4409 - DNA, 22 bp, Artificial Sequence
  Description of Artificial Sequence: Synthetic oligonucleotide
tttggagaacaacctgtctggc

SEQ ID NO: 4410 - DNA, 22 bp, Artificial Sequence
  Description of Artificial Sequence: Synthetic oligonucleotide
aatgtcaatgtcaaacttgcgg

SEQ ID NO: 4411 - DNA, 22 bp, Artificial Sequence
  Description of Artificial Sequence: Synthetic oligonucleotide
aattaggtgcactccaacgggc

SEQ ID NO: 4412 - DNA, 22 bp, Artificial Sequence
  Description of Artificial Sequence: Synthetic oligonucleotide
ttatgtcggtcacagatgccca

SEQ ID NO: 4413 - DNA, 22 bp, Artificial Sequence
  Description of Artificial Sequence: Synthetic oligonucleotide
attggagatgattcatcaccgt

SEQ ID NO: 4414 - DNA, 22 bp, Artificial Sequence
  Description of Artificial Sequence: Synthetic oligonucleotide
taatgagaggataacagctcca

SEQ ID NO: 4415 - DNA, 22 bp, Artificial Sequence
  Description of Artificial Sequence: Synthetic oligonucleotide
ttaacgtaagtgtccatgacct

SEQ ID NO: 4416 - DNA, 22 bp, Artificial Sequence
  Description of Artificial Sequence: Synthetic oligonucleotide
atatatccaaagtctatgtgga

SEQ ID NO: 4417 - DNA, 22 bp, Artificial Sequence
  Description of Artificial Sequence: Synthetic oligonucleotide
taatgacgccggagaaacccga

SEQ ID NO: 4418 - DNA, 22 bp, Artificial Sequence
  Description of Artificial Sequence: Synthetic oligonucleotide
ttcctgtatcaagcactgtcct

SEQ ID NO: 4419 - DNA, 22 bp, Artificial Sequence
  Description of Artificial Sequence: Synthetic oligonucleotide
atatacacagtcagcaatgccc

SEQ ID NO: 4420 - DNA, 22 bp, Artificial Sequence
  Description of Artificial Sequence: Synthetic oligonucleotide
tatcctatatacacagtcagca

SEQ ID NO: 4421 - DNA, 22 bp, Artificial Sequence
  Description of Artificial Sequence: Synthetic oligonucleotide
ataggcttccagaatcacagcg

SEQ ID NO: 4422 - DNA, 22 bp, Artificial Sequence
  Description of Artificial Sequence: Synthetic oligonucleotide
ttaagttgtgaaataacttggg

SEQ ID NO: 4423 - DNA, 22 bp, Artificial Sequence
  Description of Artificial Sequence: Synthetic oligonucleotide
tttaaactcaagccatagtggt

SEQ ID NO: 4424 - DNA, 22 bp, Artificial Sequence
  Description of Artificial Sequence: Synthetic oligonucleotide
ttagatctccagttggccacgc

SEQ ID NO: 4425 - DNA, 22 bp, Artificial Sequence
  Description of Artificial Sequence: Synthetic oligonucleotide
ttgtgggacagctttgagggca

SEQ ID NO: 4426 - DNA, 22 bp, Artificial Sequence
  Description of Artificial Sequence: Synthetic oligonucleotide
tttagctgagttgttctgccgc

SEQ ID NO: 4427 - DNA, 22 bp, Artificial Sequence
  Description of Artificial Sequence: Synthetic oligonucleotide
aattatcaatactctcggtgct

SEQ ID NO: 4428 - DNA, 22 bp, Artificial Sequence
  Description of Artificial Sequence: Synthetic oligonucleotide
aatcacaagaatcttgtatggc

SEQ ID NO: 4429 - DNA, 22 bp, Artificial Sequence
  Description of Artificial Sequence: Synthetic oligonucleotide
taaaggctgacgtctcaaagcc

SEQ ID NO: 4430 - DNA, 22 bp, Artificial Sequence
  Description of Artificial Sequence: Synthetic oligonucleotide
ttggattgtcgtcacataggca

SEQ ID NO: 4431 - DNA, 22 bp, Artificial Sequence
  Description of Artificial Sequence: Synthetic oligonucleotide
ataatcttgatgttctttccct

SEQ ID NO: 4432 - DNA, 22 bp, Artificial Sequence
  Description of Artificial Sequence: Synthetic oligonucleotide
ttcttgaagaagcctcgggcct

SEQ ID NO: 4433 - DNA, 22 bp, Artificial Sequence
  Description of Artificial Sequence: Synthetic oligonucleotide
atacttaagaacttaagcagct

SEQ ID NO: 4434 - DNA, 22 bp, Artificial Sequence
  Description of Artificial Sequence: Synthetic oligonucleotide
attcttctggaggagaggaggg

SEQ ID NO: 4435 - DNA, 22 bp, Artificial Sequence
  Description of Artificial Sequence: Synthetic oligonucleotide
tttggtggtgacttcagagccg

SEQ ID NO: 4436 - DNA, 22 bp, Artificial Sequence
  Description of Artificial Sequence: Synthetic oligonucleotide
ttcaagctccaggattgggccc

SEQ ID NO: 4437 - DNA, 22 bp, Artificial Sequence
  Description of Artificial Sequence: Synthetic oligonucleotide
attagcagggtgatggtgaggc

SEQ ID NO: 4438 - DNA, 22 bp, Artificial Sequence
  Description of Artificial Sequence: Synthetic oligonucleotide
ttcccttaaggcacggagagct

SEQ ID NO: 4439 - DNA, 22 bp, Artificial Sequence
  Description of Artificial Sequence: Synthetic oligonucleotide
tagagagatcatacgtgctcgg

SEQ ID NO: 4440 - DNA, 22 bp, Artificial Sequence
  Description of Artificial Sequence: Synthetic oligonucleotide
attaataacaggtcgatgtcct

SEQ ID NO: 4441 - DNA, 22 bp, Artificial Sequence
  Description of Artificial Sequence: Synthetic oligonucleotide
tctattagagagatcatacgtg

SEQ ID NO: 4442 - DNA, 22 bp, Artificial Sequence
  Description of Artificial Sequence: Synthetic oligonucleotide
cttgagattgtggatgtgccgc

SEQ ID NO: 4443 - DNA, 22 bp, Artificial Sequence
  Description of Artificial Sequence: Synthetic oligonucleotide
ttgtacttgtggatagcttggc

SEQ ID NO: 4444 - DNA, 22 bp, Artificial Sequence
  Description of Artificial Sequence: Synthetic oligonucleotide
ttgattctgaagtgaagctggg

SEQ ID NO: 4445 - DNA, 22 bp, Artificial Sequence
  Description of Artificial Sequence: Synthetic oligonucleotide
atatatatcgtgcttgatactg

SEQ ID NO: 4446 - DNA, 22 bp, Artificial Sequence
  Description of Artificial Sequence: Synthetic oligonucleotide
ataccacagaggtttgtgtgcc

SEQ ID NO: 4447 - DNA, 22 bp, Artificial Sequence
  Description of Artificial Sequence: Synthetic oligonucleotide
ataaaggtgtatgcaaaggcct

SEQ ID NO: 4448 - DNA, 22 bp, Artificial Sequence
  Description of Artificial Sequence: Synthetic oligonucleotide
tttaattcataattggtagcct

SEQ ID NO: 4449 - DNA, 22 bp, Artificial Sequence
  Description of Artificial Sequence: Synthetic oligonucleotide
taaatatacaagaaccgttctg

SEQ ID NO: 4450 - DNA, 22 bp, Artificial Sequence
  Description of Artificial Sequence: Synthetic oligonucleotide
tttcatcttcatcctcagtggg

SEQ ID NO: 4451 - DNA, 22 bp, Artificial Sequence
  Description of Artificial Sequence: Synthetic oligonucleotide
atggctctggagaggttgaggc

SEQ ID NO: 4452 - DNA, 22 bp, Artificial Sequence
  Description of Artificial Sequence: Synthetic oligonucleotide
tttctcttatagaagtggtccc

SEQ ID NO: 4453 - DNA, 22 bp, Artificial Sequence
  Description of Artificial Sequence: Synthetic oligonucleotide
atttcattctcctgaagctgga

SEQ ID NO: 4454 - DNA, 22 bp, Artificial Sequence
  Description of Artificial Sequence: Synthetic oligonucleotide
atatcttctcatccacgatggc

SEQ ID NO: 4455 - DNA, 22 bp, Artificial Sequence
  Description of Artificial Sequence: Synthetic oligonucleotide
ataattcaacagaaactttggc

SEQ ID NO: 4456 - DNA, 22 bp, Artificial Sequence
  Description of Artificial Sequence: Synthetic oligonucleotide
tttgataattcttgaacctgcc

SEQ ID NO: 4457 - DNA, 22 bp, Artificial Sequence
  Description of Artificial Sequence: Synthetic oligonucleotide
tttaagagagaatagtagtgct

SEQ ID NO: 4458 - DNA, 22 bp, Artificial Sequence
  Description of Artificial Sequence: Synthetic oligonucleotide
attcaaatcaacatcctctgca

SEQ ID NO: 4459 - DNA, 22 bp, Artificial Sequence
  Description of Artificial Sequence: Synthetic oligonucleotide
tttcttcagtacctcaaatcct

SEQ ID NO: 4460 - DNA, 22 bp, Artificial Sequence
  Description of Artificial Sequence: Synthetic oligonucleotide
atagaatttcctattagctgtt

SEQ ID NO: 4461 - DNA, 22 bp, Artificial Sequence
  Description of Artificial Sequence: Synthetic oligonucleotide
atgtttcctaactttgtctcct

SEQ ID NO: 4462 - DNA, 22 bp, Artificial Sequence
  Description of Artificial Sequence: Synthetic oligonucleotide
attgttaagaagtttgtagccg

SEQ ID NO: 4463 - DNA, 22 bp, Artificial Sequence
  Description of Artificial Sequence: Synthetic oligonucleotide
ttaggtgttgtgttgagtggct

SEQ ID NO: 4464 - DNA, 22 bp, Artificial Sequence
  Description of Artificial Sequence: Synthetic oligonucleotide
taattacagaagctagagccga

SEQ ID NO: 4465 - DNA, 22 bp, Artificial Sequence
  Description of Artificial Sequence: Synthetic oligonucleotide
attggagatgatattcaaacga

SEQ ID NO: 4466 - DNA, 22 bp, Artificial Sequence
  Description of Artificial Sequence: Synthetic oligonucleotide
ataaacaagctgtagatgaggc

SEQ ID NO: 4467 - DNA, 22 bp, Artificial Sequence
  Description of Artificial Sequence: Synthetic oligonucleotide
atatttcttcgctatattaggt

SEQ ID NO: 4468 - DNA, 22 bp, Artificial Sequence
  Description of Artificial Sequence: Synthetic oligonucleotide
attatacttcccaatatttcca

SEQ ID NO: 4469 - DNA, 22 bp, Artificial Sequence
  Description of Artificial Sequence: Synthetic oligonucleotide
aatccattaattatacttccca

SEQ ID NO: 4470 - DNA, 22 bp, Artificial Sequence
  Description of Artificial Sequence: Synthetic oligonucleotide
attattccagtaatagagagct

SEQ ID NO: 4471 - DNA, 22 bp, Artificial Sequence
  Description of Artificial Sequence: Synthetic oligonucleotide
ttagcctttaatgcaagaaggt

SEQ ID NO: 4472 - DNA, 22 bp, Artificial Sequence
  Description of Artificial Sequence: Synthetic oligonucleotide
attaaagctgctactgtgagca

SEQ ID NO: 4473 - DNA, 22 bp, Artificial Sequence
  Description of Artificial Sequence: Synthetic oligonucleotide
tttgctcaggataatctcaggg

SEQ ID NO: 4474 - DNA, 22 bp, Artificial Sequence
  Description of Artificial Sequence: Synthetic oligonucleotide
attagatgcaaggaactctggg

SEQ ID NO: 4475 - DNA, 22 bp, Artificial Sequence
  Description of Artificial Sequence: Synthetic oligonucleotide
tactccgaaaggaaggttggcg

SEQ ID NO: 4476 - DNA, 22 bp, Artificial Sequence
  Description of Artificial Sequence: Synthetic oligonucleotide
ttattctgagttggattctccc

SEQ ID NO: 4477 - DNA, 22 bp, Artificial Sequence
  Description of Artificial Sequence: Synthetic oligonucleotide
ttgaccaacaacaatattggca

SEQ ID NO: 4478 - DNA, 22 bp, Artificial Sequence
  Description of Artificial Sequence: Synthetic oligonucleotide
ttgtccttaaaggagaactgga

SEQ ID NO: 4479 - DNA, 22 bp, Artificial Sequence
  Description of Artificial Sequence: Synthetic oligonucleotide
attagatacaaggaactctggg

SEQ ID NO: 4480 - DNA, 22 bp, Artificial Sequence
  Description of Artificial Sequence: Synthetic oligonucleotide
taagtggtgcctgttcagggct

SEQ ID NO: 4481 - DNA, 22 bp, Artificial Sequence
  Description of Artificial Sequence: Synthetic oligonucleotide
tactccaaagggtaggtgtgct

SEQ ID NO: 4482 - DNA, 22 bp, Artificial Sequence
  Description of Artificial Sequence: Synthetic oligonucleotide
atttctacagacagtcgtcggt

SEQ ID NO: 4483 - DNA, 22 bp, Artificial Sequence
  Description of Artificial Sequence: Synthetic oligonucleotide
ttatgaagaaagaacaatccga

SEQ ID NO: 4484 - DNA, 22 bp, Artificial Sequence
  Description of Artificial Sequence: Synthetic oligonucleotide
ttaaggattcacttccactgcg

SEQ ID NO: 4485 - DNA, 22 bp, Artificial Sequence
  Description of Artificial Sequence: Synthetic oligonucleotide
ttaaacttgtgtttgctgcggg

SEQ ID NO: 4486 - DNA, 22 bp, Artificial Sequence
  Description of Artificial Sequence: Synthetic oligonucleotide
tttacgtagggatctgacaggc

SEQ ID NO: 4487 - DNA, 22 bp, Artificial Sequence
  Description of Artificial Sequence: Synthetic oligonucleotide
atttggagacagtgttggtcgt

SEQ ID NO: 4488 - DNA, 22 bp, Artificial Sequence
  Description of Artificial Sequence: Synthetic oligonucleotide
tttcgttctgaaagcatgacct

SEQ ID NO: 4489 - DNA, 22 bp, Artificial Sequence
  Description of Artificial Sequence: Synthetic oligonucleotide
attgtgaaggaagaagaggccg

SEQ ID NO: 4490 - DNA, 22 bp, Artificial Sequence
  Description of Artificial Sequence: Synthetic oligonucleotide
attctccagcagctgtggccgg

SEQ ID NO: 4491 - DNA, 22 bp, Artificial Sequence
  Description of Artificial Sequence: Synthetic oligonucleotide
atatggaattactgtctgtgca

SEQ ID NO: 4492 - DNA, 22 bp, Artificial Sequence
  Description of Artificial Sequence: Synthetic oligonucleotide
ataacttggaagagataatcct

SEQ ID NO: 4493 - DNA, 22 bp, Artificial Sequence
  Description of Artificial Sequence: Synthetic oligonucleotide
ttggattctgtcaatttctcct

SEQ ID NO: 4494 - DNA, 22 bp, Artificial Sequence
  Description of Artificial Sequence: Synthetic oligonucleotide
tatgtcacccgtggtccgggcc

SEQ ID NO: 4495 - DNA, 22 bp, Artificial Sequence
  Description of Artificial Sequence: Synthetic oligonucleotide
ttcttcagagccttgatggcga

SEQ ID NO: 4496 - DNA, 22 bp, Artificial Sequence
  Description of Artificial Sequence: Synthetic oligonucleotide
aatcttgtcaaggtgaattggt

SEQ ID NO: 4497 - DNA, 22 bp, Artificial Sequence
  Description of Artificial Sequence: Synthetic oligonucleotide
atttcagataaaggaatttcct

SEQ ID NO: 4498 - DNA, 22 bp, Artificial Sequence
  Description of Artificial Sequence: Synthetic oligonucleotide
tttcgaaacaatgaggattggc

SEQ ID NO: 4499 - DNA, 22 bp, Artificial Sequence
  Description of Artificial Sequence: Synthetic oligonucleotide
attgttgataagatcaatggct

SEQ ID NO: 4500 - DNA, 22 bp, Artificial Sequence
  Description of Artificial Sequence: Synthetic oligonucleotide
tttaatgctgtcatgcttccgg

SEQ ID NO: 4501 - DNA, 22 bp, Artificial Sequence
  Description of Artificial Sequence: Synthetic oligonucleotide
tttcttcaccactttcatggcg

SEQ ID NO: 4502 - DNA, 22 bp, Artificial Sequence
  Description of Artificial Sequence: Synthetic oligonucleotide
tttaaccctctgaggatctggt

SEQ ID NO: 4503 - DNA, 22 bp, Artificial Sequence
  Description of Artificial Sequence: Synthetic oligonucleotide
ttgatgaaggatgttgggtccc

SEQ ID NO: 4504 - DNA, 22 bp, Artificial Sequence
  Description of Artificial Sequence: Synthetic oligonucleotide
tttgctgattagatttaaggcg

SEQ ID NO: 4505 - DNA, 22 bp, Artificial Sequence
  Description of Artificial Sequence: Synthetic oligonucleotide
tatctaaatatgatgatgacct

SEQ ID NO: 4506 - DNA, 22 bp, Artificial Sequence
  Description of Artificial Sequence: Synthetic oligonucleotide
tttatcaacaacatcagtaggc

SEQ ID NO: 4507 - DNA, 22 bp, Artificial Sequence
  Description of Artificial Sequence: Synthetic oligonucleotide
attctagttgggacactgagct

SEQ ID NO: 4508 - DNA, 22 bp, Artificial Sequence
  Description of Artificial Sequence: Synthetic oligonucleotide
atattactgggctttaagtccc

SEQ ID NO: 4509 - DNA, 22 bp, Artificial Sequence
  Description of Artificial Sequence: Synthetic oligonucleotide
tttctcaaagctatatccagca

SEQ ID NO: 4510 - DNA, 22 bp, Artificial Sequence
  Description of Artificial Sequence: Synthetic oligonucleotide
tttggataacaaatcccttgcc

SEQ ID NO: 4511 - DNA, 22 bp, Artificial Sequence
  Description of Artificial Sequence: Synthetic oligonucleotide
ttagatgcatctattaccagca

SEQ ID NO: 4512 - DNA, 22 bp, Artificial Sequence
  Description of Artificial Sequence: Synthetic oligonucleotide
taaaccaggaattgaacgtgct

SEQ ID NO: 4513 - DNA, 22 bp, Artificial Sequence
  Description of Artificial Sequence: Synthetic oligonucleotide
ttaataccacaaagcatctggt

SEQ ID NO: 4514 - DNA, 22 bp, Artificial Sequence
  Description of Artificial Sequence: Synthetic oligonucleotide
atctctatgaattataccagct

SEQ ID NO: 4515 - DNA, 22 bp, Artificial Sequence
  Description of Artificial Sequence: Synthetic oligonucleotide
aagtttcttcatgaactctgct

SEQ ID NO: 4516 - DNA, 22 bp, Artificial Sequence
  Description of Artificial Sequence: Synthetic oligonucleotide
tttgattccaggatactttggt

SEQ ID NO: 4517 - DNA, 22 bp, Artificial Sequence
  Description of Artificial Sequence: Synthetic oligonucleotide
tatgataacatcatgatggcca

SEQ ID NO: 4518 - DNA, 22 bp, Artificial Sequence
  Description of Artificial Sequence: Synthetic oligonucleotide
ataacgtgtcaccacatatgga

SEQ ID NO: 4519 - DNA, 22 bp, Artificial Sequence
  Description of Artificial Sequence: Synthetic oligonucleotide
tttattgtgctcggagtccgct

SEQ ID NO: 4520 - DNA, 22 bp, Artificial Sequence
  Description of Artificial Sequence: Synthetic oligonucleotide
tatacatttgagcttagctgca

SEQ ID NO: 4521 - DNA, 22 bp, Artificial Sequence
  Description of Artificial Sequence: Synthetic oligonucleotide
ttcaggatctgggtcagctggt

SEQ ID NO: 4522 - DNA, 22 bp, Artificial Sequence
  Description of Artificial Sequence: Synthetic oligonucleotide
atcatcaaacggctgctgggcc

SEQ ID NO: 4523 - DNA, 22 bp, Artificial Sequence
  Description of Artificial Sequence: Synthetic oligonucleotide
atctccttgtagatgtgctgct

SEQ ID NO: 4524 - DNA, 22 bp, Artificial Sequence
  Description of Artificial Sequence: Synthetic oligonucleotide
ttcacgaaggcagcaatgtccg

SEQ ID NO: 4525 - DNA, 22 bp, Artificial Sequence
  Description of Artificial Sequence: Synthetic oligonucleotide
tttccaatagaaatgcaagcct

SEQ ID NO: 4526 - DNA, 22 bp, Artificial Sequence
  Description of Artificial Sequence: Synthetic oligonucleotide
tataggctccaggtcatctgcc

SEQ ID NO: 4527 - DNA, 22 bp, Artificial Sequence
  Description of Artificial Sequence: Synthetic oligonucleotide
tttactgtggctcggatccgct

SEQ ID NO: 4528 - DNA, 22 bp, Artificial Sequence
  Description of Artificial Sequence: Synthetic oligonucleotide
atatccaaatccatcagtagcc

SEQ ID NO: 4529 - DNA, 22 bp, Artificial Sequence
  Description of Artificial Sequence: Synthetic oligonucleotide
tttccctaagatgtcctctgga

SEQ ID NO: 4530 - DNA, 22 bp, Artificial Sequence
  Description of Artificial Sequence: Synthetic oligonucleotide
aataataaaggactaactgcct

SEQ ID NO: 4531 - DNA, 22 bp, Artificial Sequence
  Description of Artificial Sequence: Synthetic oligonucleotide
ttataatgaaatccttctggcc

SEQ ID NO: 4532 - DNA, 22 bp, Artificial Sequence
  Description of Artificial Sequence: Synthetic oligonucleotide
atttatctctgatgtatctgct

SEQ ID NO: 4533 - DNA, 22 bp, Artificial Sequence
  Description of Artificial Sequence: Synthetic oligonucleotide
tttaataacgtaagtctttccg

SEQ ID NO: 4534 - DNA, 22 bp, Artificial Sequence
  Description of Artificial Sequence: Synthetic oligonucleotide
atttattctggaaatagctggt

SEQ ID NO: 4535 - DNA, 22 bp, Artificial Sequence
  Description of Artificial Sequence: Synthetic oligonucleotide
atatacttgaaagttgtcgcct

SEQ ID NO: 4536 - DNA, 22 bp, Artificial Sequence
  Description of Artificial Sequence: Synthetic oligonucleotide
attacctttaagtcagttggct

SEQ ID NO: 4537 - DNA, 22 bp, Artificial Sequence
  Description of Artificial Sequence: Synthetic oligonucleotide
ttaaaccaatacaagcactgca

SEQ ID NO: 4538 - DNA, 22 bp, Artificial Sequence
  Description of Artificial Sequence: Synthetic oligonucleotide
atcaccatctgctgtcttgccc

SEQ ID NO: 4539 - DNA, 22 bp, Artificial Sequence
  Description of Artificial Sequence: Synthetic oligonucleotide
aacatgttctgggtgatctggc

SEQ ID NO: 4540 - DNA, 22 bp, Artificial Sequence
  Description of Artificial Sequence: Synthetic oligonucleotide
attaagcatcagggtcagagct

SEQ ID NO: 4541 - DNA, 22 bp, Artificial Sequence
  Description of Artificial Sequence: Synthetic oligonucleotide
tttcctttagggttaagatggc

SEQ ID NO: 4542 - DNA, 22 bp, Artificial Sequence
  Description of Artificial Sequence: Synthetic oligonucleotide
atacatggccactctgtctgca

SEQ ID NO: 4543 - DNA, 22 bp, Artificial Sequence
  Description of Artificial Sequence: Synthetic oligonucleotide
attctcttctccacagctaggc

SEQ ID NO: 4544 - DNA, 22 bp, Artificial Sequence
  Description of Artificial Sequence: Synthetic oligonucleotide
aattaaagtcttagcatcagca

SEQ ID NO: 4545 - DNA, 22 bp, Artificial Sequence
  Description of Artificial Sequence: Synthetic oligonucleotide
ttcttctccaaactgcaaagcc

SEQ ID NO: 4546 - DNA, 22 bp, Artificial Sequence
  Description of Artificial Sequence: Synthetic oligonucleotide
aagtcgaaacccacgatgaggg

SEQ ID NO: 4547 - DNA, 22 bp, Artificial Sequence
  Description of Artificial Sequence: Synthetic oligonucleotide
aatcttgagggattgatctcgc

SEQ ID NO: 4548 - DNA, 22 bp, Artificial Sequence
  Description of Artificial Sequence: Synthetic oligonucleotide
taagagcacacagatcagtcct

SEQ ID NO: 4549 - DNA, 22 bp, Artificial Sequence
  Description of Artificial Sequence: Synthetic oligonucleotide
tttcctaaggagttccactgcc

SEQ ID NO: 4550 - DNA, 22 bp, Artificial Sequence
  Description of Artificial Sequence: Synthetic oligonucleotide
ttcaggatgaagcgtttctgga

SEQ ID NO: 4551 - DNA, 22 bp, Artificial Sequence
  Description of Artificial Sequence: Synthetic oligonucleotide
ttcaactcatacaggttcagcc

SEQ ID NO: 4552 - DNA, 22 bp, Artificial Sequence
  Description of Artificial Sequence: Synthetic oligonucleotide
ttctcatacaagaggttggcca

SEQ ID NO: 4553 - DNA, 22 bp, Artificial Sequence
  Description of Artificial Sequence: Synthetic oligonucleotide
ttgtccttctcgatgatgtgga

SEQ ID NO: 4554 - DNA, 22 bp, Artificial Sequence
  Description of Artificial Sequence: Synthetic oligonucleotide
ataatgcgagagatgttgcgga

SEQ ID NO: 4555 - DNA, 22 bp, Artificial Sequence
  Description of Artificial Sequence: Synthetic oligonucleotide
ttcaaatactggaaatcagcgt

SEQ ID NO: 4556 - DNA, 22 bp, Artificial Sequence
  Description of Artificial Sequence: Synthetic oligonucleotide
ttctccagaacttctcgcagca

SEQ ID NO: 4557 - DNA, 22 bp, Artificial Sequence
  Description of Artificial Sequence: Synthetic oligonucleotide
atacttctcatgtagatcagcc

SEQ ID NO: 4558 - DNA, 22 bp, Artificial Sequence
  Description of Artificial Sequence: Synthetic oligonucleotide
tataaataggatggaggatggg

SEQ ID NO: 4559 - DNA, 22 bp, Artificial Sequence
  Description of Artificial Sequence: Synthetic oligonucleotide
ttcgctcaccagattcttggct

SEQ ID NO: 4560 - DNA, 22 bp, Artificial Sequence
  Description of Artificial Sequence: Synthetic oligonucleotide
ttatagctgatatttctcacca

SEQ ID NO: 4561 - DNA, 22 bp, Artificial Sequence
  Description of Artificial Sequence: Synthetic oligonucleotide
atagcgtctgtggtgaagcgcc

SEQ ID NO: 4562 - DNA, 22 bp, Artificial Sequence
  Description of Artificial Sequence: Synthetic oligonucleotide
aataaacacgatggacggtgca

SEQ ID NO: 4563 - DNA, 22 bp, Artificial Sequence
  Description of Artificial Sequence: Synthetic oligonucleotide
tattgggaagcagactgctgca

SEQ ID NO: 4564 - DNA, 22 bp, Artificial Sequence
  Description of Artificial Sequence: Synthetic oligonucleotide
tttctatccaatctccctggcc

SEQ ID NO: 4565 - DNA, 22 bp, Artificial Sequence
  Description of Artificial Sequence: Synthetic oligonucleotide
aatcttaaatatgtgggtccga

SEQ ID NO: 4566 - DNA, 22 bp, Artificial Sequence
  Description of Artificial Sequence: Synthetic oligonucleotide
ttcaacactcattgaacgagcg

SEQ ID NO: 4567 - DNA, 22 bp, Artificial Sequence
  Description of Artificial Sequence: Synthetic oligonucleotide
ttatcattcacaatcagctgga

SEQ ID NO: 4568 - DNA, 22 bp, Artificial Sequence
  Description of Artificial Sequence: Synthetic oligonucleotide
tttcttcttatccatggcccgg

SEQ ID NO: 4569 - DNA, 22 bp, Artificial Sequence
  Description of Artificial Sequence: Synthetic oligonucleotide
taatgggtctaccttgttgggc

SEQ ID NO: 4570 - DNA, 22 bp, Artificial Sequence
  Description of Artificial Sequence: Synthetic oligonucleotide
tttctgtaccagttcagagcca

SEQ ID NO: 4571 - DNA, 22 bp, Artificial Sequence
  Description of Artificial Sequence: Synthetic oligonucleotide
tttaattgttcccttaactcct

SEQ ID NO: 4572 - DNA, 22 bp, Artificial Sequence
  Description of Artificial Sequence: Synthetic oligonucleotide
atatcttggtccattggtagct

SEQ ID NO: 4573 - DNA, 22 bp, Artificial Sequence
  Description of Artificial Sequence: Synthetic oligonucleotide
taactctgggtttgtaagaggt

SEQ ID NO: 4574 - DNA, 22 bp, Artificial Sequence
  Description of Artificial Sequence: Synthetic oligonucleotide
atactttagatgccactaaggc

SEQ ID NO: 4575 - DNA, 22 bp, Artificial Sequence
  Description of Artificial Sequence: Synthetic oligonucleotide
ttatatcaccaccatgattggc

SEQ ID NO: 4576 - DNA, 22 bp, Artificial Sequence
  Description of Artificial Sequence: Synthetic oligonucleotide
ataagcattcccaatatgagcc

SEQ ID NO: 4577 - DNA, 22 bp, Artificial Sequence
  Description of Artificial Sequence: Synthetic oligonucleotide
tttgaatctcccatcacaggca

SEQ ID NO: 4578 - DNA, 22 bp, Artificial Sequence
  Description of Artificial Sequence: Synthetic oligonucleotide
taaatgtgtcaggccctgtgcc

SEQ ID NO: 4579 - DNA, 22 bp, Artificial Sequence
  Description of Artificial Sequence: Synthetic oligonucleotide
tttgcctagaataatgtttcga

SEQ ID NO: 4580 - DNA, 22 bp, Artificial Sequence
  Description of Artificial Sequence: Synthetic oligonucleotide
tttgaagtgaagaagccctgca

SEQ ID NO: 4581 - DNA, 22 bp, Artificial Sequence
  Description of Artificial Sequence: Synthetic oligonucleotide
ataatagtaacactttgcggct

SEQ ID NO: 4582 - DNA, 22 bp, Artificial Sequence
  Description of Artificial Sequence: Synthetic oligonucleotide
attgttgttggcctgctctggg

SEQ ID NO: 4583 - DNA, 22 bp, Artificial Sequence
  Description of Artificial Sequence: Synthetic oligonucleotide
tactttctccttcttgaggcgt

SEQ ID NO: 4584 - DNA, 22 bp, Artificial Sequence
  Description of Artificial Sequence: Synthetic oligonucleotide
tttactttctccttcttgaggc

SEQ ID NO: 4585 - DNA, 22 bp, Artificial Sequence
  Description of Artificial Sequence: Synthetic oligonucleotide
atcatcctcctccttggctggc

SEQ ID NO: 4586 - DNA, 22 bp, Artificial Sequence
  Description of Artificial Sequence: Synthetic oligonucleotide
attcttgtgtagtttagggcct

SEQ ID NO: 4587 - DNA, 22 bp, Artificial Sequence
  Description of Artificial Sequence: Synthetic oligonucleotide
aagtagtagcatttgagctggg

SEQ ID NO: 4588 - DNA, 22 bp, Artificial Sequence
  Description of Artificial Sequence: Synthetic oligonucleotide
tttaaataactcgtgccctgcc

SEQ ID NO: 4589 - DNA, 22 bp, Artificial Sequence
  Description of Artificial Sequence: Synthetic oligonucleotide
taagaacttgtctctctgccgt

SEQ ID NO: 4590 - DNA, 22 bp, Artificial Sequence
  Description of Artificial Sequence: Synthetic oligonucleotide
ttaagaatgccttaatccaggg

SEQ ID NO: 4591 - DNA, 22 bp, Artificial Sequence
  Description of Artificial Sequence: Synthetic oligonucleotide
attcctatttagggccgtggcc

SEQ ID NO: 4592 - DNA, 22 bp, Artificial Sequence
  Description of Artificial Sequence: Synthetic oligonucleotide
ttctatgaagctcttctgaccc

SEQ ID NO: 4593 - DNA, 22 bp, Artificial Sequence
  Description of Artificial Sequence: Synthetic oligonucleotide
attgagtgtgagaacctgtggc

SEQ ID NO: 4594 - DNA, 22 bp, Artificial Sequence
  Description of Artificial Sequence: Synthetic oligonucleotide
ttaaacccaggccacctttggc

SEQ ID NO: 4595 - DNA, 22 bp, Artificial Sequence
  Description of Artificial Sequence: Synthetic oligonucleotide
tttcggcaggttgctcagggca

SEQ ID NO: 4596 - DNA, 22 bp, Artificial Sequence
  Description of Artificial Sequence: Synthetic oligonucleotide
ataatacccgactgcatgtcca

SEQ ID NO: 4597 - DNA, 22 bp, Artificial Sequence
  Description of Artificial Sequence: Synthetic oligonucleotide
taatgagaccatctccttgggc

SEQ ID NO: 4598 - DNA, 22 bp, Artificial Sequence
  Description of Artificial Sequence: Synthetic oligonucleotide
ttcataaagcttaatgagacca

SEQ ID NO: 4599 - DNA, 22 bp, Artificial Sequence
  Description of Artificial Sequence: Synthetic oligonucleotide
atgtggcaacgaagtgtgacct

SEQ ID NO: 4600 - DNA, 22 bp, Artificial Sequence
  Description of Artificial Sequence: Synthetic oligonucleotide
tatgatccaatcacaagttgct

SEQ ID NO: 4601 - DNA, 22 bp, Artificial Sequence
  Description of Artificial Sequence: Synthetic oligonucleotide
ttatcccaggaatctgaaggct

SEQ ID NO: 4602 - DNA, 22 bp, Artificial Sequence
  Description of Artificial Sequence: Synthetic oligonucleotide
atatccattcatatccctgggc

SEQ ID NO: 4603 - DNA, 22 bp, Artificial Sequence
  Description of Artificial Sequence: Synthetic oligonucleotide
tttatatctatttccaactgca

SEQ ID NO: 4604 - DNA, 22 bp, Artificial Sequence
  Description of Artificial Sequence: Synthetic oligonucleotide
atacagaaagaaatggtaacga

SEQ ID NO: 4605 - DNA, 22 bp, Artificial Sequence
  Description of Artificial Sequence: Synthetic oligonucleotide
atggcagagtgagggtggaggg

SEQ ID NO: 4606 - DNA, 22 bp, Artificial Sequence
  Description of Artificial Sequence: Synthetic oligonucleotide
attgcttcttccagttgcaggg

SEQ ID NO: 4607 - DNA, 22 bp, Artificial Sequence
  Description of Artificial Sequence: Synthetic oligonucleotide
tttcttcttcttagattctgct

SEQ ID NO: 4608 - DNA, 22 bp, Artificial Sequence
  Description of Artificial Sequence: Synthetic oligonucleotide
atgtactataagtcaacttcct

SEQ ID NO: 4609 - DNA, 22 bp, Artificial Sequence
  Description of Artificial Sequence: Synthetic oligonucleotide
tttgttcttaggaagcttggcc

SEQ ID NO: 4610 - DNA, 22 bp, Artificial Sequence
  Description of Artificial Sequence: Synthetic oligonucleotide
ttcgaatttccaagtacagcgg

SEQ ID NO: 4611 - DNA, 22 bp, Artificial Sequence
  Description of Artificial Sequence: Synthetic oligonucleotide
taagatgtaactcctttgtgcc

SEQ ID NO: 4612 - DNA, 22 bp, Artificial Sequence
  Description of Artificial Sequence: Synthetic oligonucleotide
atctgttggccagtactgtgca

SEQ ID NO: 4613 - DNA, 22 bp, Artificial Sequence
  Description of Artificial Sequence: Synthetic oligonucleotide
tttctgtatactagaatctccc

SEQ ID NO: 4614 - DNA, 22 bp, Artificial Sequence
  Description of Artificial Sequence: Synthetic oligonucleotide
tttagctgtgccatggatccct

SEQ ID NO: 4615 - DNA, 22 bp, Artificial Sequence
  Description of Artificial Sequence: Synthetic oligonucleotide
tttacaaattccagaaagtcgg

SEQ ID NO: 4616 - DNA, 22 bp, Artificial Sequence
  Description of Artificial Sequence: Synthetic oligonucleotide
atatccagtgggtaaatgggca

SEQ ID NO: 4617 - DNA, 22 bp, Artificial Sequence
  Description of Artificial Sequence: Synthetic oligonucleotide
atttacaaacacttcgcttggg

SEQ ID NO: 4618 - DNA, 22 bp, Artificial Sequence
  Description of Artificial Sequence: Synthetic oligonucleotide
tttctttgactgtttgggtggt

SEQ ID NO: 4619 - DNA, 22 bp, Artificial Sequence
  Description of Artificial Sequence: Synthetic oligonucleotide
attgactcccgcagggaatggt

SEQ ID NO: 4620 - DNA, 22 bp, Artificial Sequence
  Description of Artificial Sequence: Synthetic oligonucleotide
atttataatgctggaagaagga

SEQ ID NO: 4621 - DNA, 22 bp, Artificial Sequence
  Description of Artificial Sequence: Synthetic oligonucleotide
atatctagtggataaactggct

SEQ ID NO: 4622 - DNA, 22 bp, Artificial Sequence
  Description of Artificial Sequence: Synthetic oligonucleotide
ttctcatcagggcctagcagct

SEQ ID NO: 4623 - DNA, 22 bp, Artificial Sequence
  Description of Artificial Sequence: Synthetic oligonucleotide
ttctggtgtctgatggtctggc

SEQ ID NO: 4624 - DNA, 22 bp, Artificial Sequence
  Description of Artificial Sequence: Synthetic oligonucleotide
ttaatctcttcgagaaactgct

SEQ ID NO: 4625 - DNA, 22 bp, Artificial Sequence
  Description of Artificial Sequence: Synthetic oligonucleotide
aatatttgaatcctctcccgga

SEQ ID NO: 4626 - DNA, 22 bp, Artificial Sequence
  Description of Artificial Sequence: Synthetic oligonucleotide
tattcctcatagattccttgct

SEQ ID NO: 4627 - DNA, 22 bp, Artificial Sequence
  Description of Artificial Sequence: Synthetic oligonucleotide
tttctaaaggccagtactggcc

SEQ ID NO: 4628 - DNA, 22 bp, Artificial Sequence
  Description of Artificial Sequence: Synthetic oligonucleotide
taatgattcatgttctccacgc

SEQ ID NO: 4629 - DNA, 22 bp, Artificial Sequence
  Description of Artificial Sequence: Synthetic oligonucleotide
ttagcgtatagtcatgagcggc

SEQ ID NO: 4630 - DNA, 22 bp, Artificial Sequence
  Description of Artificial Sequence: Synthetic oligonucleotide
tttaatgtcaatttaactcggc

SEQ ID NO: 4631 - DNA, 22 bp, Artificial Sequence
  Description of Artificial Sequence: Synthetic oligonucleotide
tttagatctgaacttaattcct

SEQ ID NO: 4632 - DNA, 22 bp, Artificial Sequence
  Description of Artificial Sequence: Synthetic oligonucleotide
attgccttcagataaatcaggt

SEQ ID NO: 4633 - DNA, 22 bp, Artificial Sequence
  Description of Artificial Sequence: Synthetic oligonucleotide
tattcccataggtccagcagcc

SEQ ID NO: 4634 - DNA, 22 bp, Artificial Sequence
  Description of Artificial Sequence: Synthetic oligonucleotide
atatcggtttgcaccatctggc

SEQ ID NO: 4635 - DNA, 22 bp, Artificial Sequence
  Description of Artificial Sequence: Synthetic oligonucleotide
attgtgtggagaagagggccct

SEQ ID NO: 4636 - DNA, 22 bp, Artificial Sequence
  Description of Artificial Sequence: Synthetic oligonucleotide
tattaaaggcaatcctcctggt

SEQ ID NO: 4637 - DNA, 22 bp, Artificial Sequence
  Description of Artificial Sequence: Synthetic oligonucleotide
ttaagtctccactaatactggt

SEQ ID NO: 4638 - DNA, 22 bp, Artificial Sequence
  Description of Artificial Sequence: Synthetic oligonucleotide
taaacaaatagtagtatctgct

SEQ ID NO: 4639 - DNA, 22 bp, Artificial Sequence
  Description of Artificial Sequence: Synthetic oligonucleotide
atttctaaccagagtatttcca

SEQ ID NO: 4640 - DNA, 22 bp, Artificial Sequence
  Description of Artificial Sequence: Synthetic oligonucleotide
tatctcagagagttcaacacgg

SEQ ID NO: 4641 - DNA, 22 bp, Artificial Sequence
  Description of Artificial Sequence: Synthetic oligonucleotide
tttctgaatgatgtaatctgga

SEQ ID NO: 4642 - DNA, 22 bp, Artificial Sequence
  Description of Artificial Sequence: Synthetic oligonucleotide
tttctttggaagatcatctgcc

SEQ ID NO: 4643 - DNA, 22 bp, Artificial Sequence
  Description of Artificial Sequence: Synthetic oligonucleotide
ttacataaggcattggtgaccc

SEQ ID NO: 4644 - DNA, 22 bp, Artificial Sequence
  Description of Artificial Sequence: Synthetic oligonucleotide
aatacttgtttcagactcaggt

SEQ ID NO: 4645 - DNA, 22 bp, Artificial Sequence
  Description of Artificial Sequence: Synthetic oligonucleotide
ttaacttctgtgtggctcggcc

SEQ ID NO: 4646 - DNA, 22 bp, Artificial Sequence
  Description of Artificial Sequence: Synthetic oligonucleotide
tttgtaaatccaccataatgct

SEQ ID NO: 4647 - DNA, 22 bp, Artificial Sequence
  Description of Artificial Sequence: Synthetic oligonucleotide
attgtacagaatcttaaagggc

SEQ ID NO: 4648 - DNA, 22 bp, Artificial Sequence
  Description of Artificial Sequence: Synthetic oligonucleotide
atatggcttcagacgttctgcc

SEQ ID NO: 4649 - DNA, 22 bp, Artificial Sequence
  Description of Artificial Sequence: Synthetic oligonucleotide
attcgcatagcggttcttgggc

SEQ ID NO: 4650 - DNA, 22 bp, Artificial Sequence
  Description of Artificial Sequence: Synthetic oligonucleotide
tataaccatccaggaagctggc

SEQ ID NO: 4651 - DNA, 22 bp, Artificial Sequence
  Description of Artificial Sequence: Synthetic oligonucleotide
ttatgatcccaaatcattcgcc

SEQ ID NO: 4652 - DNA, 22 bp, Artificial Sequence
  Description of Artificial Sequence: Synthetic oligonucleotide
ataagggtgacggtaaaggcct

SEQ ID NO: 4653 - DNA, 22 bp, Artificial Sequence
  Description of Artificial Sequence: Synthetic oligonucleotide
tttgttcttcattagagaggca

SEQ ID NO: 4654 - DNA, 22 bp, Artificial Sequence
  Description of Artificial Sequence: Synthetic oligonucleotide
tttctgtagcggttcttggcgt

SEQ ID NO: 4655 - DNA, 22 bp, Artificial Sequence
  Description of Artificial Sequence: Synthetic oligonucleotide
atttgattgtagaagatacggg

SEQ ID NO: 4656 - DNA, 22 bp, Artificial Sequence
  Description of Artificial Sequence: Synthetic oligonucleotide
tttgtcctgaactctatggcct

SEQ ID NO: 4657 - DNA, 22 bp, Artificial Sequence
  Description of Artificial Sequence: Synthetic oligonucleotide
tatttctacccgagaattgcca

SEQ ID NO: 4658 - DNA, 22 bp, Artificial Sequence
  Description of Artificial Sequence: Synthetic oligonucleotide
aattcaaatacgtgacttccgt

SEQ ID NO: 4659 - DNA, 22 bp, Artificial Sequence
  Description of Artificial Sequence: Synthetic oligonucleotide
taatatgttcaaagtgccagga

SEQ ID NO: 4660 - DNA, 22 bp, Artificial Sequence
  Description of Artificial Sequence: Synthetic oligonucleotide
attgatgttcttagtctgggct

SEQ ID NO: 4661 - DNA, 22 bp, Artificial Sequence
  Description of Artificial Sequence: Synthetic oligonucleotide
ataagcactgataggagcacct

SEQ ID NO: 4662 - DNA, 22 bp, Artificial Sequence
  Description of Artificial Sequence: Synthetic oligonucleotide
tatttatagcatttaacccggc

SEQ ID NO: 4663 - DNA, 22 bp, Artificial Sequence
  Description of Artificial Sequence: Synthetic oligonucleotide
attgtaaatatcaacaacaccc

SEQ ID NO: 4664 - DNA, 22 bp, Artificial Sequence
  Description of Artificial Sequence: Synthetic oligonucleotide
ataagctggcatagagggtgct

SEQ ID NO: 4665 - DNA, 22 bp, Artificial Sequence
  Description of Artificial Sequence: Synthetic oligonucleotide
tatttgatagacactgacaggt

SEQ ID NO: 4666 - DNA, 22 bp, Artificial Sequence
  Description of Artificial Sequence: Synthetic oligonucleotide
ataaccatcgatataattgcca

SEQ ID NO: 4667 - DNA, 22 bp, Artificial Sequence
  Description of Artificial Sequence: Synthetic oligonucleotide
ttgaacaaggacttcgtggcca

SEQ ID NO: 4668 - DNA, 22 bp, Artificial Sequence
  Description of Artificial Sequence: Synthetic oligonucleotide
ttaaagtcagatcatgattcct

SEQ ID NO: 4669 - DNA, 22 bp, Artificial Sequence
  Description of Artificial Sequence: Synthetic oligonucleotide
aattagcattaatgtaggtgct

SEQ ID NO: 4670 - DNA, 22 bp, Artificial Sequence
  Description of Artificial Sequence: Synthetic oligonucleotide
ttaagacaaggtttcgaatggt

SEQ ID NO: 4671 - DNA, 22 bp, Artificial Sequence
  Description of Artificial Sequence: Synthetic oligonucleotide
ttcatatacacaaggagctgga

SEQ ID NO: 4672 - DNA, 22 bp, Artificial Sequence
  Description of Artificial Sequence: Synthetic oligonucleotide
atcacttgcaactttagcagca

SEQ ID NO: 4673 - DNA, 22 bp, Artificial Sequence
  Description of Artificial Sequence: Synthetic oligonucleotide
ttcatatatgagcagaacagct

SEQ ID NO: 4674 - DNA, 22 bp, Artificial Sequence
  Description of Artificial Sequence: Synthetic oligonucleotide
tatattcgatgacgtaatagga

SEQ ID NO: 4675 - DNA, 22 bp, Artificial Sequence
  Description of Artificial Sequence: Synthetic oligonucleotide
aatactgatcacacttgatccg

SEQ ID NO: 4676 - DNA, 22 bp, Artificial Sequence
  Description of Artificial Sequence: Synthetic oligonucleotide
ataagccattagtgcatatggc

SEQ ID NO: 4677 - DNA, 22 bp, Artificial Sequence
  Description of Artificial Sequence: Synthetic oligonucleotide
atttcatcggaatgtataagct

SEQ ID NO: 4678 - DNA, 22 bp, Artificial Sequence
  Description of Artificial Sequence: Synthetic oligonucleotide
taaatctgcaacatgctttgga

SEQ ID NO: 4679 - DNA, 22 bp, Artificial Sequence
  Description of Artificial Sequence: Synthetic oligonucleotide
taacttccacattatgttccca

SEQ ID NO: 4680 - DNA, 22 bp, Artificial Sequence
  Description of Artificial Sequence: Synthetic oligonucleotide
ttccagttgggtatgagtaggg

SEQ ID NO: 4681 - DNA, 22 bp, Artificial Sequence
  Description of Artificial Sequence: Synthetic oligonucleotide
attgccatttctttcagctggt

SEQ ID NO: 4682 - DNA, 22 bp, Artificial Sequence
  Description of Artificial Sequence: Synthetic oligonucleotide
tttacctgttccactctcagca

SEQ ID NO: 4683 - DNA, 22 bp, Artificial Sequence
  Description of Artificial Sequence: Synthetic oligonucleotide
ttatgaatgaagaaaggacggg

SEQ ID NO: 4684 - DNA, 22 bp, Artificial Sequence
  Description of Artificial Sequence: Synthetic oligonucleotide
taagaggctgggctgacgaggg

SEQ ID NO: 4685 - DNA, 22 bp, Artificial Sequence
  Description of Artificial Sequence: Synthetic oligonucleotide
tattctcgtaagactgacccgt

SEQ ID NO: 4686 - DNA, 22 bp, Artificial Sequence
  Description of Artificial Sequence: Synthetic oligonucleotide
atttaacatgaaagaatgggct

SEQ ID NO: 4687 - DNA, 22 bp, Artificial Sequence
  Description of Artificial Sequence: Synthetic oligonucleotide
ttattagctccttctttggcgc

SEQ ID NO: 4688 - DNA, 22 bp, Artificial Sequence
  Description of Artificial Sequence: Synthetic oligonucleotide
attatccaggacatcactgcca

SEQ ID NO: 4689 - DNA, 22 bp, Artificial Sequence
  Description of Artificial Sequence: Synthetic oligonucleotide
aatggcgaacatagcttcagct

SEQ ID NO: 4690 - DNA, 22 bp, Artificial Sequence
  Description of Artificial Sequence: Synthetic oligonucleotide
taagattgtccagtagacagct

SEQ ID NO: 4691 - DNA, 22 bp, Artificial Sequence
  Description of Artificial Sequence: Synthetic oligonucleotide
tagatatcccaacttctttgct

SEQ ID NO: 4692 - DNA, 22 bp, Artificial Sequence
  Description of Artificial Sequence: Synthetic oligonucleotide
aaggtactggaggatcagccgg

SEQ ID NO: 4693 - DNA, 22 bp, Artificial Sequence
  Description of Artificial Sequence: Synthetic oligonucleotide
taaagccttggacttgaggccc

SEQ ID NO: 4694 - DNA, 22 bp, Artificial Sequence
  Description of Artificial Sequence: Synthetic oligonucleotide
tattgcttgagggcaaggagcc

SEQ ID NO: 4695 - DNA, 22 bp, Artificial Sequence
  Description of Artificial Sequence: Synthetic oligonucleotide
aatgtgggcaacattaaaggca

SEQ ID NO: 4696 - DNA, 22 bp, Artificial Sequence
  Description of Artificial Sequence: Synthetic oligonucleotide
tattaaatgaagattgtagcct

SEQ ID NO: 4697 - DNA, 22 bp, Artificial Sequence
  Description of Artificial Sequence: Synthetic oligonucleotide
atcagtattccaatctaagcgt

SEQ ID NO: 4698 - DNA, 22 bp, Artificial Sequence
  Description of Artificial Sequence: Synthetic oligonucleotide
atctttactgcaacatctccgt

SEQ ID NO: 4699 - DNA, 22 bp, Artificial Sequence
  Description of Artificial Sequence: Synthetic oligonucleotide
atatagcttactaagatctggg

SEQ ID NO: 4700 - DNA, 22 bp, Artificial Sequence
  Description of Artificial Sequence: Synthetic oligonucleotide
attgatatcctcagtgtgggct

SEQ ID NO: 4701 - DNA, 22 bp, Artificial Sequence
  Description of Artificial Sequence: Synthetic oligonucleotide
ttcaaggaactccacgaaagcg

SEQ ID NO: 4702 - DNA, 22 bp, Artificial Sequence
  Description of Artificial Sequence: Synthetic oligonucleotide
atataatcacagagagtgtgga

SEQ ID NO: 4703 - DNA, 22 bp, Artificial Sequence
  Description of Artificial Sequence: Synthetic oligonucleotide
ttattcccaggatatcaaaccc

SEQ ID NO: 4704 - DNA, 22 bp, Artificial Sequence
  Description of Artificial Sequence: Synthetic oligonucleotide
ttattaactcagttctgaaggc

SEQ ID NO: 4705 - DNA, 22 bp, Artificial Sequence
  Description of Artificial Sequence: Synthetic oligonucleotide
tttcctcctcagagagcatgct

SEQ ID NO: 4706 - DNA, 22 bp, Artificial Sequence
  Description of Artificial Sequence: Synthetic oligonucleotide
ttctagctgaactaactctgct

SEQ ID NO: 4707 - DNA, 22 bp, Artificial Sequence
  Description of Artificial Sequence: Synthetic oligonucleotide
ttcattcatcaggttcatgccg

SEQ ID NO: 4708 - DNA, 22 bp, Artificial Sequence
  Description of Artificial Sequence: Synthetic oligonucleotide
aataacaatgtcaaggcctggg

SEQ ID NO: 4709 - DNA, 22 bp, Artificial Sequence
  Description of Artificial Sequence: Synthetic oligonucleotide
ttgaataacaatgtcaaggcct

SEQ ID NO: 4710 - DNA, 22 bp, Artificial Sequence
  Description of Artificial Sequence: Synthetic oligonucleotide
tttagaatgaaggaaatatgca

SEQ ID NO: 4711 - DNA, 22 bp, Artificial Sequence
  Description of Artificial Sequence: Synthetic oligonucleotide
aagtatggaaatgaagttgggc

SEQ ID NO: 4712 - DNA, 22 bp, Artificial Sequence
  Description of Artificial Sequence: Synthetic oligonucleotide
ttgaaattagcaaggatgtgct

SEQ ID NO: 4713 - DNA, 22 bp, Artificial Sequence
  Description of Artificial Sequence: Synthetic oligonucleotide
atatgagttgcttggcgctgga

SEQ ID NO: 4714 - DNA, 22 bp, Artificial Sequence
  Description of Artificial Sequence: Synthetic oligonucleotide
attctgttgctccttggcaggt

SEQ ID NO: 4715 - DNA, 22 bp, Artificial Sequence
  Description of Artificial Sequence: Synthetic oligonucleotide
taatccatccaactgaatagct

SEQ ID NO: 4716 - DNA, 22 bp, Artificial Sequence
  Description of Artificial Sequence: Synthetic oligonucleotide
aattcattggagtcagactccc

SEQ ID NO: 4717 - DNA, 22 bp, Artificial Sequence
  Description of Artificial Sequence: Synthetic oligonucleotide
attgatttgaaggtaacttccc

SEQ ID NO: 4718 - DNA, 22 bp, Artificial Sequence
  Description of Artificial Sequence: Synthetic oligonucleotide
atttgtagagatgtccttgccc

SEQ ID NO: 4719 - DNA, 22 bp, Artificial Sequence
  Description of Artificial Sequence: Synthetic oligonucleotide
tttggacttgaagagctcagca

SEQ ID NO: 4720 - DNA, 22 bp, Artificial Sequence
  Description of Artificial Sequence: Synthetic oligonucleotide
atcatctttaatatatgtccca

SEQ ID NO: 4721 - DNA, 22 bp, Artificial Sequence
  Description of Artificial Sequence: Synthetic oligonucleotide
ttcagcttctatataatctcct

SEQ ID NO: 4722 - DNA, 22 bp, Artificial Sequence
  Description of Artificial Sequence: Synthetic oligonucleotide
ttaattgaattgctttgctgca

SEQ ID NO: 4723 - DNA, 22 bp, Artificial Sequence
  Description of Artificial Sequence: Synthetic oligonucleotide
ttccaagtcagcttgtaaagct

SEQ ID NO: 4724 - DNA, 22 bp, Artificial Sequence
  Description of Artificial Sequence: Synthetic oligonucleotide
tttaggacacatatctatggct

SEQ ID NO: 4725 - DNA, 22 bp, Artificial Sequence
  Description of Artificial Sequence: Synthetic oligonucleotide
tttatgatccagttctagggct

SEQ ID NO: 4726 - DNA, 22 bp, Artificial Sequence
  Description of Artificial Sequence: Synthetic oligonucleotide
tttatgtaagtgtcatcaagct

SEQ ID NO: 4727 - DNA, 22 bp, Artificial Sequence
  Description of Artificial Sequence: Synthetic oligonucleotide
taatctttatattgcacaccca

SEQ ID NO: 4728 - DNA, 22 bp, Artificial Sequence
  Description of Artificial Sequence: Synthetic oligonucleotide
tttccttaacacagtacagcgg

SEQ ID NO: 4729 - DNA, 22 bp, Artificial Sequence
  Description of Artificial Sequence: Synthetic oligonucleotide
tttctgttagactcactcagga

SEQ ID NO: 4730 - DNA, 22 bp, Artificial Sequence
  Description of Artificial Sequence: Synthetic oligonucleotide
tttgatttgaacacctcgtggc

SEQ ID NO: 4731 - DNA, 22 bp, Artificial Sequence
  Description of Artificial Sequence: Synthetic oligonucleotide
atttcttgcagtttgctctggc

SEQ ID NO: 4732 - DNA, 22 bp, Artificial Sequence
  Description of Artificial Sequence: Synthetic oligonucleotide
aatttccagcatttctagtggt

SEQ ID NO: 4733 - DNA, 22 bp, Artificial Sequence
  Description of Artificial Sequence: Synthetic oligonucleotide
attcttgggcagttaataccgt

SEQ ID NO: 4734 - DNA, 22 bp, Artificial Sequence
  Description of Artificial Sequence: Synthetic oligonucleotide
ttagattgccactgtttctggt

SEQ ID NO: 4735 - DNA, 22 bp, Artificial Sequence
  Description of Artificial Sequence: Synthetic oligonucleotide
ttaacacctgaaataccttgct

SEQ ID NO: 4736 - DNA, 22 bp, Artificial Sequence
  Description of Artificial Sequence: Synthetic oligonucleotide
tttgtaataaagtaaggcgcgg

SEQ ID NO: 4737 - DNA, 22 bp, Artificial Sequence
  Description of Artificial Sequence: Synthetic oligonucleotide
tttcatttcaagtcgggaacct

SEQ ID NO: 4738 - DNA, 22 bp, Artificial Sequence
  Description of Artificial Sequence: Synthetic oligonucleotide
attccacaggacatcaattcca

SEQ ID NO: 4739 - DNA, 22 bp, Artificial Sequence
  Description of Artificial Sequence: Synthetic oligonucleotide
atatcacggcacagaagcgggc

SEQ ID NO: 4740 - DNA, 22 bp, Artificial Sequence
  Description of Artificial Sequence: Synthetic oligonucleotide
attctaaagaaccgagatggct

SEQ ID NO: 4741 - DNA, 22 bp, Artificial Sequence
  Description of Artificial Sequence: Synthetic oligonucleotide
tttaggcaatatgcaaactgca

SEQ ID NO: 4742 - DNA, 22 bp, Artificial Sequence
  Description of Artificial Sequence: Synthetic oligonucleotide
ttcacagataacactgtaagca

SEQ ID NO: 4743 - DNA, 22 bp, Artificial Sequence
  Description of Artificial Sequence: Synthetic oligonucleotide
ttctgggagcggctgcagcggc

SEQ ID NO: 4744 - DNA, 22 bp, Artificial Sequence
  Description of Artificial Sequence: Synthetic oligonucleotide
ttatttgacaattggctgagcc

SEQ ID NO: 4745 - DNA, 22 bp, Artificial Sequence
  Description of Artificial Sequence: Synthetic oligonucleotide
aatcctcttcagacatggagcc

SEQ ID NO: 4746 - DNA, 22 bp, Artificial Sequence
  Description of Artificial Sequence: Synthetic oligonucleotide
attccttcacatatatcctggc

SEQ ID NO: 4747 - DNA, 22 bp, Artificial Sequence
  Description of Artificial Sequence: Synthetic oligonucleotide
ttcttaaagtggtggatctcct

SEQ ID NO: 4748 - DNA, 22 bp, Artificial Sequence
  Description of Artificial Sequence: Synthetic oligonucleotide
atactccttcaggcactctggg

SEQ ID NO: 4749 - DNA, 22 bp, Artificial Sequence
  Description of Artificial Sequence: Synthetic oligonucleotide
tttaaagctaatcttcttaggt

SEQ ID NO: 4750 - DNA, 22 bp, Artificial Sequence
  Description of Artificial Sequence: Synthetic oligonucleotide
taaggctaccagttctgctgca

SEQ ID NO: 4751 - DNA, 22 bp, Artificial Sequence
  Description of Artificial Sequence: Synthetic oligonucleotide
tatagccactgcatgatgggca

SEQ ID NO: 4752 - DNA, 22 bp, Artificial Sequence
  Description of Artificial Sequence: Synthetic oligonucleotide
tttgacttctcaatggtgtcca

SEQ ID NO: 4753 - DNA, 22 bp, Artificial Sequence
  Description of Artificial Sequence: Synthetic oligonucleotide
ttcttcaaactcatgccgggcc

SEQ ID NO: 4754 - DNA, 22 bp, Artificial Sequence
  Description of Artificial Sequence: Synthetic oligonucleotide
ttaggtgggaagtgcctcagca

SEQ ID NO: 4755 - DNA, 22 bp, Artificial Sequence
  Description of Artificial Sequence: Synthetic oligonucleotide
aatggctgggataatctggccc

SEQ ID NO: 4756 - DNA, 22 bp, Artificial Sequence
  Description of Artificial Sequence: Synthetic oligonucleotide
ttctactattgcagaaacacgc

SEQ ID NO: 4757 - DNA, 22 bp, Artificial Sequence
  Description of Artificial Sequence: Synthetic oligonucleotide
taaagtaaatgtaatgacagga

SEQ ID NO: 4758 - DNA, 22 bp, Artificial Sequence
  Description of Artificial Sequence: Synthetic oligonucleotide
tttgccacagatatgctatgct

SEQ ID NO: 4759 - DNA, 22 bp, Artificial Sequence
  Description of Artificial Sequence: Synthetic oligonucleotide
atacatcatatgttggactcca

SEQ ID NO: 4760 - DNA, 22 bp, Artificial Sequence
  Description of Artificial Sequence: Synthetic oligonucleotide
taaagttggagattataatcgc

SEQ ID NO: 4761 - DNA, 22 bp, Artificial Sequence
  Description of Artificial Sequence: Synthetic oligonucleotide
ttatccagtaaactaagatgca

SEQ ID NO: 4762 - DNA, 22 bp, Artificial Sequence
  Description of Artificial Sequence: Synthetic oligonucleotide
tttctgaatcctcttcagcgcc

SEQ ID NO: 4763 - DNA, 22 bp, Artificial Sequence
  Description of Artificial Sequence: Synthetic oligonucleotide
ttactgtttatgtttggatggt

SEQ ID NO: 4764 - DNA, 22 bp, Artificial Sequence
  Description of Artificial Sequence: Synthetic oligonucleotide
atagatttgtgcaatatctggt

SEQ ID NO: 4765 - DNA, 22 bp, Artificial Sequence
  Description of Artificial Sequence: Synthetic oligonucleotide
aattcacttaattatcagccgt

SEQ ID NO: 4766 - DNA, 22 bp, Artificial Sequence
  Description of Artificial Sequence: Synthetic oligonucleotide
ttgagtgttcaaattcagggca

SEQ ID NO: 4767 - DNA, 22 bp, Artificial Sequence
  Description of Artificial Sequence: Synthetic oligonucleotide
atcattcttgaaagtacaagct

SEQ ID NO: 4768 - DNA, 22 bp, Artificial Sequence
  Description of Artificial Sequence: Synthetic oligonucleotide
tacaatgatagattcttgtccg

SEQ ID NO: 4769 - DNA, 22 bp, Artificial Sequence
  Description of Artificial Sequence: Synthetic oligonucleotide
tatgtccaagcaaataacacct

SEQ ID NO: 4770 - DNA, 22 bp, Artificial Sequence
  Description of Artificial Sequence: Synthetic oligonucleotide
tttatgtagcgtatctcttggt

SEQ ID NO: 4771 - DNA, 22 bp, Artificial Sequence
  Description of Artificial Sequence: Synthetic oligonucleotide
taatgtaagaattgtgaaaccc

SEQ ID NO: 4772 - DNA, 22 bp, Artificial Sequence
  Description of Artificial Sequence: Synthetic oligonucleotide
atatctgttatagaaataccct

SEQ ID NO: 4773 - DNA, 22 bp, Artificial Sequence
  Description of Artificial Sequence: Synthetic oligonucleotide
atttgagaacattctggcaggt

SEQ ID NO: 4774 - DNA, 22 bp, Artificial Sequence
  Description of Artificial Sequence: Synthetic oligonucleotide
ttatccaaccttaataccaggc

SEQ ID NO: 4775 - DNA, 22 bp, Artificial Sequence
  Description of Artificial Sequence: Synthetic oligonucleotide
tttcctaaaccacttctctggc

SEQ ID NO: 4776 - DNA, 22 bp, Artificial Sequence
  Description of Artificial Sequence: Synthetic oligonucleotide
aacatgaaggagcctaaggcct

SEQ ID NO: 4777 - DNA, 22 bp, Artificial Sequence
  Description of Artificial Sequence: Synthetic oligonucleotide
taataaattcccagtgcatcca

SEQ ID NO: 4778 - DNA, 22 bp, Artificial Sequence
  Description of Artificial Sequence: Synthetic oligonucleotide
tacaacataggtataataccgc

SEQ ID NO: 4779 - DNA, 22 bp, Artificial Sequence
  Description of Artificial Sequence: Synthetic oligonucleotide
atacaacataggtataataccg

SEQ ID NO: 4780 - DNA, 22 bp, Artificial Sequence
  Description of Artificial Sequence: Synthetic oligonucleotide
tttgaaagggtatttatcaggt

SEQ ID NO: 4781 - DNA, 22 bp, Artificial Sequence
  Description of Artificial Sequence: Synthetic oligonucleotide
taggccaataactgaggcagga

SEQ ID NO: 4782 - DNA, 22 bp, Artificial Sequence
  Description of Artificial Sequence: Synthetic oligonucleotide
atcactctgggtacaagaacct

SEQ ID NO: 4783 - DNA, 22 bp, Artificial Sequence
  Description of Artificial Sequence: Synthetic oligonucleotide
ttctgctattatcttattggct

SEQ ID NO: 4784 - DNA, 22 bp, Artificial Sequence
  Description of Artificial Sequence: Synthetic oligonucleotide
ttggcagtaaatcgtgtaggcc

SEQ ID NO: 4785 - DNA, 22 bp, Artificial Sequence
  Description of Artificial Sequence: Synthetic oligonucleotide
tttccatacagccagctgaggc

SEQ ID NO: 4786 - DNA, 22 bp, Artificial Sequence
  Description of Artificial Sequence: Synthetic oligonucleotide
tataaacacaaaggaagtggcg

SEQ ID NO: 4787 - DNA, 22 bp, Artificial Sequence
  Description of Artificial Sequence: Synthetic oligonucleotide
tttaaatgtgatcttcggtggt

SEQ ID NO: 4788 - DNA, 22 bp, Artificial Sequence
  Description of Artificial Sequence: Synthetic oligonucleotide
ttaagtcatcttctccacagga

SEQ ID NO: 4789 - DNA, 22 bp, Artificial Sequence
  Description of Artificial Sequence: Synthetic oligonucleotide
ttaaacgtttcacaacaatcca

SEQ ID NO: 4790 - DNA, 22 bp, Artificial Sequence
  Description of Artificial Sequence: Synthetic oligonucleotide
tattctaaagacctggttagct

SEQ ID NO: 4791 - DNA, 22 bp, Artificial Sequence
  Description of Artificial Sequence: Synthetic oligonucleotide
tttcttaacacacatgaaaggt

SEQ ID NO: 4792 - DNA, 22 bp, Artificial Sequence
  Description of Artificial Sequence: Synthetic oligonucleotide
attagatatggagagaggtggg

SEQ ID NO: 4793 - DNA, 22 bp, Artificial Sequence
  Description of Artificial Sequence: Synthetic oligonucleotide
ttcaaatgggctacaatatcca

SEQ ID NO: 4794 - DNA, 22 bp, Artificial Sequence
  Description of Artificial Sequence: Synthetic oligonucleotide
tattcaccttccttcttatccc

SEQ ID NO: 4795 - DNA, 22 bp, Artificial Sequence
  Description of Artificial Sequence: Synthetic oligonucleotide
attatcagcaattctctgaccc

SEQ ID NO: 4796 - DNA, 22 bp, Artificial Sequence
  Description of Artificial Sequence: Synthetic oligonucleotide
attgagctccagtctctgtccc

SEQ ID NO: 4797 - DNA, 22 bp, Artificial Sequence
  Description of Artificial Sequence: Synthetic oligonucleotide
aattacacagtgagctttgggc

SEQ ID NO: 4798 - DNA, 22 bp, Artificial Sequence
  Description of Artificial Sequence: Synthetic oligonucleotide
aatgctaattacacagtgagct

SEQ ID NO: 4799 - DNA, 22 bp, Artificial Sequence
  Description of Artificial Sequence: Synthetic oligonucleotide
tttattccacgcctcggtaggg

SEQ ID NO: 4800 - DNA, 22 bp, Artificial Sequence
  Description of Artificial Sequence: Synthetic oligonucleotide
atatgagaggatggtggctcct

SEQ ID NO: 4801 - DNA, 22 bp, Artificial Sequence
  Description of Artificial Sequence: Synthetic oligonucleotide
ttatgtcagctgttccatagga

SEQ ID NO: 4802 - DNA, 22 bp, Artificial Sequence
  Description of Artificial Sequence: Synthetic oligonucleotide
ttaagatagcaagtattgccga

SEQ ID NO: 4803 - DNA, 22 bp, Artificial Sequence
  Description of Artificial Sequence: Synthetic oligonucleotide
tttgatctagtttgtctctggt

SEQ ID NO: 4804 - DNA, 22 bp, Artificial Sequence
  Description of Artificial Sequence: Synthetic oligonucleotide
ttaaactttcacattccaagca

SEQ ID NO: 4805 - DNA, 22 bp, Artificial Sequence
  Description of Artificial Sequence: Synthetic oligonucleotide
atttatcttctcctacaatcct

SEQ ID NO: 4806 - DNA, 22 bp, Artificial Sequence
  Description of Artificial Sequence: Synthetic oligonucleotide
taacagaagcagtgtaatgccc

SEQ ID NO: 4807 - DNA, 22 bp, Artificial Sequence
  Description of Artificial Sequence: Synthetic oligonucleotide
atagctcataatctgctttgct

SEQ ID NO: 4808 - DNA, 22 bp, Artificial Sequence
  Description of Artificial Sequence: Synthetic oligonucleotide
atgaggttgcagaagaacacgg

SEQ ID NO: 4809 - DNA, 22 bp, Artificial Sequence
  Description of Artificial Sequence: Synthetic oligonucleotide
atgttggactcctcagtgggca

SEQ ID NO: 4810 - DNA, 22 bp, Artificial Sequence
  Description of Artificial Sequence: Synthetic oligonucleotide
atcatgaggatctgcatccgga

SEQ ID NO: 4811 - DNA, 22 bp, Artificial Sequence
  Description of Artificial Sequence: Synthetic oligonucleotide
atgcttacttgcacagagtggt

SEQ ID NO: 4812 - DNA, 22 bp, Artificial Sequence
  Description of Artificial Sequence: Synthetic oligonucleotide
ttccatttcacgcatctggcgt

SEQ ID NO: 4813 - DNA, 22 bp, Artificial Sequence
  Description of Artificial Sequence: Synthetic oligonucleotide
tattccaaatctatcttgcgct

SEQ ID NO: 4814 - DNA, 22 bp, Artificial Sequence
  Description of Artificial Sequence: Synthetic oligonucleotide
taaatcttgtaggagtgtcggt

SEQ ID NO: 4815 - DNA, 22 bp, Artificial Sequence
  Description of Artificial Sequence: Synthetic oligonucleotide
tatcagcaagatatatacagcc

SEQ ID NO: 4816 - DNA, 22 bp, Artificial Sequence
  Description of Artificial Sequence: Synthetic oligonucleotide
ttatcctcccaaggaagatggc

SEQ ID NO: 4817 - DNA, 22 bp, Artificial Sequence
  Description of Artificial Sequence: Synthetic oligonucleotide
ttaatcattaattccacctcgc

SEQ ID NO: 4818 - DNA, 22 bp, Artificial Sequence
  Description of Artificial Sequence: Synthetic oligonucleotide
attcacttgaggagtctgtcgc

SEQ ID NO: 4819 - DNA, 22 bp, Artificial Sequence
  Description of Artificial Sequence: Synthetic oligonucleotide
atacgttctctttctacgacga

SEQ ID NO: 4820 - DNA, 22 bp, Artificial Sequence
  Description of Artificial Sequence: Synthetic oligonucleotide
aattgtaattctcttagcaggt

SEQ ID NO: 4821 - DNA, 22 bp, Artificial Sequence
  Description of Artificial Sequence: Synthetic oligonucleotide
tatagtaaggctgacagagcgg

SEQ ID NO: 4822 - DNA, 22 bp, Artificial Sequence
  Description of Artificial Sequence: Synthetic oligonucleotide
tttaatatggcaataaatgcct

SEQ ID NO: 4823 - DNA, 22 bp, Artificial Sequence
  Description of Artificial Sequence: Synthetic oligonucleotide
tatacttctgatattccatcca

SEQ ID NO: 4824 - DNA, 22 bp, Artificial Sequence
  Description of Artificial Sequence: Synthetic oligonucleotide
atgagctattagaatatgacgg

SEQ ID NO: 4825 - DNA, 22 bp, Artificial Sequence
  Description of Artificial Sequence: Synthetic oligonucleotide
tataacgaacaagtaatgccct

SEQ ID NO: 4826 - DNA, 22 bp, Artificial Sequence
  Description of Artificial Sequence: Synthetic oligonucleotide
tttgaatatctcttaacgtcca

SEQ ID NO: 4827 - DNA, 22 bp, Artificial Sequence
  Description of Artificial Sequence: Synthetic oligonucleotide
taaattaagagccacagttggc

SEQ ID NO: 4828 - DNA, 22 bp, Artificial Sequence
  Description of Artificial Sequence: Synthetic oligonucleotide
ttatgcaataaattaagagcca

SEQ ID NO: 4829 - DNA, 22 bp, Artificial Sequence
  Description of Artificial Sequence: Synthetic oligonucleotide
ttctagatacagatcttatggc

SEQ ID NO: 4830 - DNA, 22 bp, Artificial Sequence
  Description of Artificial Sequence: Synthetic oligonucleotide
ttcagccttggcaggtgtaggc

SEQ ID NO: 4831 - DNA, 22 bp, Artificial Sequence
  Description of Artificial Sequence: Synthetic oligonucleotide
ttctcacaccatgtgcaatgcc

SEQ ID NO: 4832 - DNA, 22 bp, Artificial Sequence
  Description of Artificial Sequence: Synthetic oligonucleotide
tttgacagagactttcgctggt

SEQ ID NO: 4833 - DNA, 22 bp, Artificial Sequence
  Description of Artificial Sequence: Synthetic oligonucleotide
tttaggtgttctttcaggtggg

SEQ ID NO: 4834 - DNA, 22 bp, Artificial Sequence
  Description of Artificial Sequence: Synthetic oligonucleotide
tacttattactctgtgcagggc

SEQ ID NO: 4835 - DNA, 22 bp, Artificial Sequence
  Description of Artificial Sequence: Synthetic oligonucleotide
tttaagaaacaagcaatgccac

SEQ ID NO: 4836 - DNA, 22 bp, Artificial Sequence
  Description of Artificial Sequence: Synthetic oligonucleotide
agtcactttgaggttattgctt

SEQ ID NO: 4837 - DNA, 22 bp, Artificial Sequence
  Description of Artificial Sequence: Synthetic oligonucleotide
tattctctctagggaacaggcc

SEQ ID NO: 4838 - DNA, 22 bp, Artificial Sequence
  Description of Artificial Sequence: Synthetic oligonucleotide
atatagggtcaggataacttgt

SEQ ID NO: 4839 - DNA, 22 bp, Artificial Sequence
  Description of Artificial Sequence: Synthetic oligonucleotide
tattccaagtctctcagcagct

SEQ ID NO: 4840 - DNA, 22 bp, Artificial Sequence
  Description of Artificial Sequence: Synthetic oligonucleotide
atatgcgctggtactccaggct

SEQ ID NO: 4841 - DNA, 22 bp, Artificial Sequence
  Description of Artificial Sequence: Synthetic oligonucleotide
ttattgatcagtgatcacagct

SEQ ID NO: 4842 - DNA, 22 bp, Artificial Sequence
  Description of Artificial Sequence: Synthetic oligonucleotide
cttgagcatatacttgcggcgc

SEQ ID NO: 4843 - DNA, 22 bp, Artificial Sequence
  Description of Artificial Sequence: Synthetic oligonucleotide
ttgtcttatgaattgtactgca

SEQ ID NO: 4844 - DNA, 22 bp, Artificial Sequence
  Description of Artificial Sequence: Synthetic oligonucleotide
tatgtataacaaattaggccct

SEQ ID NO: 4845 - DNA, 22 bp, Artificial Sequence
  Description of Artificial Sequence: Synthetic oligonucleotide
ttagattaacgtgatcaaaggg

SEQ ID NO: 4846 - DNA, 22 bp, Artificial Sequence
  Description of Artificial Sequence: Synthetic oligonucleotide
ataaccaagggcctccagaggc

SEQ ID NO: 4847 - DNA, 22 bp, Artificial Sequence
  Description of Artificial Sequence: Synthetic oligonucleotide
ataggcattcctataattagcc

SEQ ID NO: 4848 - DNA, 22 bp, Artificial Sequence
  Description of Artificial Sequence: Synthetic oligonucleotide
cgacttgagcatatacttgcgg

SEQ ID NO: 4849 - DNA, 22 bp, Artificial Sequence
  Description of Artificial Sequence: Synthetic oligonucleotide
aatagaatacacgtgagctggg

SEQ ID NO: 4850 - DNA, 22 bp, Artificial Sequence
  Description of Artificial Sequence: Synthetic oligonucleotide
attatgtctaagaggattacct

SEQ ID NO: 4851 - DNA, 22 bp, Artificial Sequence
  Description of Artificial Sequence: Synthetic oligonucleotide
ttatgtactggtgtcggcccgt

SEQ ID NO: 4852 - DNA, 22 bp, Artificial Sequence
  Description of Artificial Sequence: Synthetic oligonucleotide
tttgttagccacagtaccagga

SEQ ID NO: 4853 - DNA, 22 bp, Artificial Sequence
  Description of Artificial Sequence: Synthetic oligonucleotide
tatatactggcgcctggctggg

SEQ ID NO: 4854 - DNA, 22 bp, Artificial Sequence
  Description of Artificial Sequence: Synthetic oligonucleotide
tttattgctgccctgtttaccc

SEQ ID NO: 4855 - DNA, 22 bp, Artificial Sequence
  Description of Artificial Sequence: Synthetic oligonucleotide
tttcatataattctgtacacca

SEQ ID NO: 4856 - DNA, 22 bp, Artificial Sequence
  Description of Artificial Sequence: Synthetic oligonucleotide
attaacaactgctttatacgcc

SEQ ID NO: 4857 - DNA, 22 bp, Artificial Sequence
  Description of Artificial Sequence: Synthetic oligonucleotide
atttctactaattcagtctgca

SEQ ID NO: 4858 - DNA, 22 bp, Artificial Sequence
  Description of Artificial Sequence: Synthetic oligonucleotide
tttgggttctaaatattgtcca

SEQ ID NO: 4859 - DNA, 22 bp, Artificial Sequence
  Description of Artificial Sequence: Synthetic oligonucleotide
taaactattgttcgtggcccgc

SEQ ID NO: 4860 - DNA, 22 bp, Artificial Sequence
  Description of Artificial Sequence: Synthetic oligonucleotide
tattcggaacatgtagatgcct

SEQ ID NO: 4861 - DNA, 22 bp, Artificial Sequence
  Description of Artificial Sequence: Synthetic oligonucleotide
attggcaacaatctgaagagca

SEQ ID NO: 4862 - DNA, 22 bp, Artificial Sequence
  Description of Artificial Sequence: Synthetic oligonucleotide
taatgacagcagacatgaaggc

SEQ ID NO: 4863 - DNA, 22 bp, Artificial Sequence
  Description of Artificial Sequence: Synthetic oligonucleotide
tctctttggcaaatgaggtgtt

SEQ ID NO: 4864 - DNA, 22 bp, Artificial Sequence
  Description of Artificial Sequence: Synthetic oligonucleotide
tttatcattgaaggaatttggg

SEQ ID NO: 4865 - DNA, 22 bp, Artificial Sequence
  Description of Artificial Sequence: Synthetic oligonucleotide
aatgcttatgatcttgatggcc

SEQ ID NO: 4866 - DNA, 22 bp, Artificial Sequence
  Description of Artificial Sequence: Synthetic oligonucleotide
taagattatgaagcttcatgga

SEQ ID NO: 4867 - DNA, 22 bp, Artificial Sequence
  Description of Artificial Sequence: Synthetic oligonucleotide
aataaacagagctgaaagtgcc

SEQ ID NO: 4868 - DNA, 22 bp, Artificial Sequence
  Description of Artificial Sequence: Synthetic oligonucleotide
ataactttcgtagaaatagcct

SEQ ID NO: 4869 - DNA, 22 bp, Artificial Sequence
  Description of Artificial Sequence: Synthetic oligonucleotide
tttatcaagcaggtcataagct

SEQ ID NO: 4870 - DNA, 22 bp, Artificial Sequence
  Description of Artificial Sequence: Synthetic oligonucleotide
tttctgtatgtcagtgaaaggt

SEQ ID NO: 4871 - DNA, 22 bp, Artificial Sequence
  Description of Artificial Sequence: Synthetic oligonucleotide
attgttaagagcaccagcacca

SEQ ID NO: 4872 - DNA, 22 bp, Artificial Sequence
  Description of Artificial Sequence: Synthetic oligonucleotide
tattctatgactactaaatggg

SEQ ID NO: 4873 - DNA, 22 bp, Artificial Sequence
  Description of Artificial Sequence: Synthetic oligonucleotide
ttaatgagtaatttgatctggg

SEQ ID NO: 4874 - DNA, 22 bp, Artificial Sequence
  Description of Artificial Sequence: Synthetic oligonucleotide
ttctccttcaaggagatgtcca

SEQ ID NO: 4875 - DNA, 22 bp, Artificial Sequence
  Description of Artificial Sequence: Synthetic oligonucleotide
ttactcctggagaggctgtcca

SEQ ID NO: 4876 - DNA, 22 bp, Artificial Sequence
  Description of Artificial Sequence: Synthetic oligonucleotide
atttaggtcctaagtaccggca

SEQ ID NO: 4877 - DNA, 22 bp, Artificial Sequence
  Description of Artificial Sequence: Synthetic oligonucleotide
ttcgttcactatggtatctgct

SEQ ID NO: 4878 - DNA, 22 bp, Artificial Sequence
  Description of Artificial Sequence: Synthetic oligonucleotide
tacatcattaaataaactccgg

SEQ ID NO: 4879 - DNA, 22 bp, Artificial Sequence
  Description of Artificial Sequence: Synthetic oligonucleotide
taagacaggcatagaattaggc

SEQ ID NO: 4880 - DNA, 22 bp, Artificial Sequence
  Description of Artificial Sequence: Synthetic oligonucleotide
aatcaacagaatttagagtcca

SEQ ID NO: 4881 - DNA, 22 bp, Artificial Sequence
  Description of Artificial Sequence: Synthetic oligonucleotide
ttaaatgcaacctatgatgcct

SEQ ID NO: 4882 - DNA, 22 bp, Artificial Sequence
  Description of Artificial Sequence: Synthetic oligonucleotide
taaatcataaatgcttctaggt

SEQ ID NO: 4883 - DNA, 22 bp, Artificial Sequence
  Description of Artificial Sequence: Synthetic oligonucleotide
ttatccagcagcagtcgcagga

SEQ ID NO: 4884 - DNA, 22 bp, Artificial Sequence
  Description of Artificial Sequence: Synthetic oligonucleotide
aactaaacagggataagggcct

SEQ ID NO: 4885 - DNA, 22 bp, Artificial Sequence
  Description of Artificial Sequence: Synthetic oligonucleotide
ttctctgccaggtggataggct

SEQ ID NO: 4886 - DNA, 22 bp, Artificial Sequence
  Description of Artificial Sequence: Synthetic oligonucleotide
taggactttgagattctctgcc

SEQ ID NO: 4887 - DNA, 22 bp, Artificial Sequence
  Description of Artificial Sequence: Synthetic oligonucleotide
atcattgatatctgtgactgcg

SEQ ID NO: 4888 - DNA, 22 bp, Artificial Sequence
  Description of Artificial Sequence: Synthetic oligonucleotide
ttctgtactcatcaatgtagcg

SEQ ID NO: 4889 - DNA, 22 bp, Artificial Sequence
  Description of Artificial Sequence: Synthetic oligonucleotide
atcaacaatttcatatcttgca

SEQ ID NO: 4890 - DNA, 22 bp, Artificial Sequence
  Description of Artificial Sequence: Synthetic oligonucleotide
tattaaggtgcgttcatcacgt

SEQ ID NO: 4891 - DNA, 22 bp, Artificial Sequence
  Description of Artificial Sequence: Synthetic oligonucleotide
attccttcagaggtttacaggc

SEQ ID NO: 4892 - DNA, 22 bp, Artificial Sequence
  Description of Artificial Sequence: Synthetic oligonucleotide
atctcatttaggatcttctcgc

SEQ ID NO: 4893 - DNA, 22 bp, Artificial Sequence
  Description of Artificial Sequence: Synthetic oligonucleotide
atttctcagagcacaaagggct

SEQ ID NO: 4894 - DNA, 22 bp, Artificial Sequence
  Description of Artificial Sequence: Synthetic oligonucleotide
ttatatgtgatatttctctgcc

SEQ ID NO: 4895 - DNA, 22 bp, Artificial Sequence
  Description of Artificial Sequence: Synthetic oligonucleotide
atacgtttaggttaatttagga

SEQ ID NO: 4896 - DNA, 22 bp, Artificial Sequence
  Description of Artificial Sequence: Synthetic oligonucleotide
taaacatacgttattcactgct

SEQ ID NO: 4897 - DNA, 22 bp, Artificial Sequence
  Description of Artificial Sequence: Synthetic oligonucleotide
ttagatcagcaggtcctccggc

SEQ ID NO: 4898 - DNA, 22 bp, Artificial Sequence
  Description of Artificial Sequence: Synthetic oligonucleotide
atgaggtaggcgataactagcg

SEQ ID NO: 4899 - DNA, 22 bp, Artificial Sequence
  Description of Artificial Sequence: Synthetic oligonucleotide
tttacttgaagaactaagagct

SEQ ID NO: 4900 - DNA, 22 bp, Artificial Sequence
  Description of Artificial Sequence: Synthetic oligonucleotide
tatcctggtaagtcacataggc

SEQ ID NO: 4901 - DNA, 22 bp, Artificial Sequence
  Description of Artificial Sequence: Synthetic oligonucleotide
tttccatcaattagctcccgca

SEQ ID NO: 4902 - DNA, 22 bp, Artificial Sequence
  Description of Artificial Sequence: Synthetic oligonucleotide
atgcctctttctcgtaagtgcg

SEQ ID NO: 4903 - DNA, 22 bp, Artificial Sequence
  Description of Artificial Sequence: Synthetic oligonucleotide
ttgggctttaagttctcctgca

SEQ ID NO: 4904 - DNA, 22 bp, Artificial Sequence
  Description of Artificial Sequence: Synthetic oligonucleotide
ttccatgatgatccaggtgggc

SEQ ID NO: 4905 - DNA, 22 bp, Artificial Sequence
  Description of Artificial Sequence: Synthetic oligonucleotide
taaacttcagcctgggccagga

SEQ ID NO: 4906 - DNA, 22 bp, Artificial Sequence
  Description of Artificial Sequence: Synthetic oligonucleotide
aatacaggtgaccgtggccggc

SEQ ID NO: 4907 - DNA, 22 bp, Artificial Sequence
  Description of Artificial Sequence: Synthetic oligonucleotide
tttgccaatttccaggaagcga

SEQ ID NO: 4908 - DNA, 22 bp, Artificial Sequence
  Description of Artificial Sequence: Synthetic oligonucleotide
taaggacctcagctttaaaggg

SEQ ID NO: 4909 - DNA, 22 bp, Artificial Sequence
  Description of Artificial Sequence: Synthetic oligonucleotide
taattgagaaagctggagtgga

SEQ ID NO: 4910 - DNA, 22 bp, Artificial Sequence
  Description of Artificial Sequence: Synthetic oligonucleotide
tatagcttggtaactataccct

SEQ ID NO: 4911 - DNA, 22 bp, Artificial Sequence
  Description of Artificial Sequence: Synthetic oligonucleotide
ttagtatggatgataagaaggt

SEQ ID NO: 4912 - DNA, 22 bp, Artificial Sequence
  Description of Artificial Sequence: Synthetic oligonucleotide
tataacctggtcactataccct

SEQ ID NO: 4913 - DNA, 22 bp, Artificial Sequence
  Description of Artificial Sequence: Synthetic oligonucleotide
aataagcattagcttacttcct

SEQ ID NO: 4914 - DNA, 22 bp, Artificial Sequence
  Description of Artificial Sequence: Synthetic oligonucleotide
attccaattggaatgtcgtggt

SEQ ID NO: 4915 - DNA, 22 bp, Artificial Sequence
  Description of Artificial Sequence: Synthetic oligonucleotide
atatataagctcagcattaggt

SEQ ID NO: 4916 - DNA, 22 bp, Artificial Sequence
  Description of Artificial Sequence: Synthetic oligonucleotide
tttagatctattgtgaacagcc

SEQ ID NO: 4917 - DNA, 22 bp, Artificial Sequence
  Description of Artificial Sequence: Synthetic oligonucleotide
atatattctcctggctggtgct

SEQ ID NO: 4918 - DNA, 22 bp, Artificial Sequence
  Description of Artificial Sequence: Synthetic oligonucleotide
ttatctgaggagccggtcacct

SEQ ID NO: 4919 - DNA, 22 bp, Artificial Sequence
  Description of Artificial Sequence: Synthetic oligonucleotide
ctatattgaaatagacagaggc

SEQ ID NO: 4920 - DNA, 22 bp, Artificial Sequence
  Description of Artificial Sequence: Synthetic oligonucleotide
ttctctgcacgaaggagagggc

SEQ ID NO: 4921 - DNA, 22 bp, Artificial Sequence
  Description of Artificial Sequence: Synthetic oligonucleotide
ttaggattccacataatgtcat

SEQ ID NO: 4922 - DNA, 22 bp, Artificial Sequence
  Description of Artificial Sequence: Synthetic oligonucleotide
taagcacttgaatttcatagtg

SEQ ID NO: 4923 - DNA, 22 bp, Artificial Sequence
  Description of Artificial Sequence: Synthetic oligonucleotide
attaatatgcacctgtactctc

SEQ ID NO: 4924 - DNA, 22 bp, Artificial Sequence
  Description of Artificial Sequence: Synthetic oligonucleotide
taatcataccagaatatttcct

SEQ ID NO: 4925 - DNA, 22 bp, Artificial Sequence
  Description of Artificial Sequence: Synthetic oligonucleotide
ttatgtcttgtttgtgagtcca

SEQ ID NO: 4926 - DNA, 22 bp, Artificial Sequence
  Description of Artificial Sequence: Synthetic oligonucleotide
atgcttaatcagataattggct

SEQ ID NO: 4927 - DNA, 22 bp, Artificial Sequence
  Description of Artificial Sequence: Synthetic oligonucleotide
aagtagcataagcgagtgtgga

SEQ ID NO: 4928 - DNA, 22 bp, Artificial Sequence
  Description of Artificial Sequence: Synthetic oligonucleotide
ttctagaagaactttgcttgcc

SEQ ID NO: 4929 - DNA, 22 bp, Artificial Sequence
  Description of Artificial Sequence: Synthetic oligonucleotide
taatagttgctgttaatggctt

SEQ ID NO: 4930 - DNA, 22 bp, Artificial Sequence
  Description of Artificial Sequence: Synthetic oligonucleotide
tttataaggctaagcaccagga

SEQ ID NO: 4931 - DNA, 22 bp, Artificial Sequence
  Description of Artificial Sequence: Synthetic oligonucleotide
tttccaaacgttggcattccca

SEQ ID NO: 4932 - DNA, 22 bp, Artificial Sequence
  Description of Artificial Sequence: Synthetic oligonucleotide
ataacagatcacacattgggcc

SEQ ID NO: 4933 - DNA, 22 bp, Artificial Sequence
  Description of Artificial Sequence: Synthetic oligonucleotide
tttaaagtgtcatctaattcca

SEQ ID NO: 4934 - DNA, 22 bp, Artificial Sequence
  Description of Artificial Sequence: Synthetic oligonucleotide
caatcttgagaaagtacttggt

SEQ ID NO: 4935 - DNA, 22 bp, Artificial Sequence
  Description of Artificial Sequence: Synthetic oligonucleotide
atttctactgatgttatctcca

SEQ ID NO: 4936 - DNA, 22 bp, Artificial Sequence
  Description of Artificial Sequence: Synthetic oligonucleotide
ttctccttggacttaacgtggc

SEQ ID NO: 4937 - DNA, 22 bp, Artificial Sequence
  Description of Artificial Sequence: Synthetic oligonucleotide
atagtgaggcaggaggagagga

SEQ ID NO: 4938 - DNA, 22 bp, Artificial Sequence
  Description of Artificial Sequence: Synthetic oligonucleotide
aactgggatgggtcccaagggc

SEQ ID NO: 4939 - DNA, 22 bp, Artificial Sequence
  Description of Artificial Sequence: Synthetic oligonucleotide
aatggtctggaggtccctaggc

SEQ ID NO: 4940 - DNA, 22 bp, Artificial Sequence
  Description of Artificial Sequence: Synthetic oligonucleotide
ttcattgagagcctctggaggc

SEQ ID NO: 4941 - DNA, 22 bp, Artificial Sequence
  Description of Artificial Sequence: Synthetic oligonucleotide
ataagatatagtttggtctggg

SEQ ID NO: 4942 - DNA, 22 bp, Artificial Sequence
  Description of Artificial Sequence: Synthetic oligonucleotide
atacctgttggtttccagggct

SEQ ID NO: 4943 - DNA, 22 bp, Artificial Sequence
  Description of Artificial Sequence: Synthetic oligonucleotide
tttcagaatcatcatcactggt

SEQ ID NO: 4944 - DNA, 22 bp, Artificial Sequence
  Description of Artificial Sequence: Synthetic oligonucleotide
ttatccgttccaattcagtggt

SEQ ID NO: 4945 - DNA, 22 bp, Artificial Sequence
  Description of Artificial Sequence: Synthetic oligonucleotide
ttagggctgcagtacactaggg

SEQ ID NO: 4946 - DNA, 22 bp, Artificial Sequence
  Description of Artificial Sequence: Synthetic oligonucleotide
ataaatacccatgtgggtacct

SEQ ID NO: 4947 - DNA, 22 bp, Artificial Sequence
  Description of Artificial Sequence: Synthetic oligonucleotide
ttagtttaatttcaggtgagcc

SEQ ID NO: 4948 - DNA, 22 bp, Artificial Sequence
  Description of Artificial Sequence: Synthetic oligonucleotide
ttagtatgaacctcaagctggg

SEQ ID NO: 4949 - DNA, 22 bp, Artificial Sequence
  Description of Artificial Sequence: Synthetic oligonucleotide
taatgttaagaccattatgcca

SEQ ID NO: 4950 - DNA, 22 bp, Artificial Sequence
  Description of Artificial Sequence: Synthetic oligonucleotide
ttaacggagaaacttcactggg

SEQ ID NO: 4951 - DNA, 22 bp, Artificial Sequence
  Description of Artificial Sequence: Synthetic oligonucleotide
taactgaagcatcgacattggc

SEQ ID NO: 4952 - DNA, 22 bp, Artificial Sequence
  Description of Artificial Sequence: Synthetic oligonucleotide
ttgatgcagtattccgccaggg

SEQ ID NO: 4953 - DNA, 22 bp, Artificial Sequence
  Description of Artificial Sequence: Synthetic oligonucleotide
tttatttcaggctttcgatccc

SEQ ID NO: 4954 - DNA, 22 bp, Artificial Sequence
  Description of Artificial Sequence: Synthetic oligonucleotide
taatacaatgatccagcaagct

SEQ ID NO: 4955 - DNA, 22 bp, Artificial Sequence
  Description of Artificial Sequence: Synthetic oligonucleotide
ttaaactgccactgaagctgct

SEQ ID NO: 4956 - DNA, 22 bp, Artificial Sequence
  Description of Artificial Sequence: Synthetic oligonucleotide
ttaaatggtgcaattcagtggt

SEQ ID NO: 4957 - DNA, 22 bp, Artificial Sequence
  Description of Artificial Sequence: Synthetic oligonucleotide
ataagatatccaattaacagca

SEQ ID NO: 4958 - DNA, 22 bp, Artificial Sequence
  Description of Artificial Sequence: Synthetic oligonucleotide
aattaacagcaaatacagacct

SEQ ID NO: 4959 - DNA, 22 bp, Artificial Sequence
  Description of Artificial Sequence: Synthetic oligonucleotide
aatatccttcagtgtgagtgct

SEQ ID NO: 4960 - DNA, 22 bp, Artificial Sequence
  Description of Artificial Sequence: Synthetic oligonucleotide
atagtgaatatgtttgtagcca

SEQ ID NO: 4961 - DNA, 22 bp, Artificial Sequence
  Description of Artificial Sequence: Synthetic oligonucleotide
tttctcagcctgccggcctggt

SEQ ID NO: 4962 - DNA, 22 bp, Artificial Sequence
  Description of Artificial Sequence: Synthetic oligonucleotide
ttgagggtggaaatgatgaggt

SEQ ID NO: 4963 - DNA, 22 bp, Artificial Sequence
  Description of Artificial Sequence: Synthetic oligonucleotide
ttggagtagaagatgaactcgt

SEQ ID NO: 4964 - DNA, 22 bp, Artificial Sequence
  Description of Artificial Sequence: Synthetic oligonucleotide
atggacacaccggtgatctgct

SEQ ID NO: 4965 - DNA, 22 bp, Artificial Sequence
  Description of Artificial Sequence: Synthetic oligonucleotide
aatgcataggccactgagtgca

SEQ ID NO: 4966 - DNA, 22 bp, Artificial Sequence
  Description of Artificial Sequence: Synthetic oligonucleotide
ttatagattcatctgttggtgg

SEQ ID NO: 4967 - DNA, 22 bp, Artificial Sequence
  Description of Artificial Sequence: Synthetic oligonucleotide
atcagatgtcatcttccacgga

SEQ ID NO: 4968 - DNA, 22 bp, Artificial Sequence
  Description of Artificial Sequence: Synthetic oligonucleotide
tataaacatcaatccaagccct

SEQ ID NO: 4969 - DNA, 22 bp, Artificial Sequence
  Description of Artificial Sequence: Synthetic oligonucleotide
tttctctttatctgccggtggg

SEQ ID NO: 4970 - DNA, 22 bp, Artificial Sequence
  Description of Artificial Sequence: Synthetic oligonucleotide
ttctctcacaacatcttctggg

SEQ ID NO: 4971 - DNA, 22 bp, Artificial Sequence
  Description of Artificial Sequence: Synthetic oligonucleotide
ttcatgcataagcatgtatgct

SEQ ID NO: 4972 - DNA, 22 bp, Artificial Sequence
  Description of Artificial Sequence: Synthetic oligonucleotide
ttcaggatacatgaacattcca

SEQ ID NO: 4973 - DNA, 22 bp, Artificial Sequence
  Description of Artificial Sequence: Synthetic oligonucleotide
tttaaatcttccaatgatggct

SEQ ID NO: 4974 - DNA, 22 bp, Artificial Sequence
  Description of Artificial Sequence: Synthetic oligonucleotide
ttctgtatgcctcttgcatgca

SEQ ID NO: 4975 - DNA, 22 bp, Artificial Sequence
  Description of Artificial Sequence: Synthetic oligonucleotide
attacaatacgcactgacacac

SEQ ID NO: 4976 - DNA, 22 bp, Artificial Sequence
  Description of Artificial Sequence: Synthetic oligonucleotide
taatctcaatagccagcaggca

SEQ ID NO: 4977 - DNA, 22 bp, Artificial Sequence
  Description of Artificial Sequence: Synthetic oligonucleotide
tacaatcaacagcatctgtggg

SEQ ID NO: 4978 - DNA, 22 bp, Artificial Sequence
  Description of Artificial Sequence: Synthetic oligonucleotide
attatatacactgtaaacacca

SEQ ID NO: 4979 - DNA, 22 bp, Artificial Sequence
  Description of Artificial Sequence: Synthetic oligonucleotide
attggtttcaagacagattcct

SEQ ID NO: 4980 - DNA, 22 bp, Artificial Sequence
  Description of Artificial Sequence: Synthetic oligonucleotide
tttatcttgcatgtattgcgct

SEQ ID NO: 4981 - DNA, 22 bp, Artificial Sequence
  Description of Artificial Sequence: Synthetic oligonucleotide
taaatccatcatcttataagcc

SEQ ID NO: 4982 - DNA, 22 bp, Artificial Sequence
  Description of Artificial Sequence: Synthetic oligonucleotide
aatatcatccaaaggaatccca

SEQ ID NO: 4983 - DNA, 22 bp, Artificial Sequence
  Description of Artificial Sequence: Synthetic oligonucleotide
ttaggattccagtctaaatcct

SEQ ID NO: 4984 - DNA, 22 bp, Artificial Sequence
  Description of Artificial Sequence: Synthetic oligonucleotide
tttcttccactgaaacagtccc

SEQ ID NO: 4985 - DNA, 22 bp, Artificial Sequence
  Description of Artificial Sequence: Synthetic oligonucleotide
atggtgtagaggttctcgcggc

SEQ ID NO: 4986 - DNA, 22 bp, Artificial Sequence
  Description of Artificial Sequence: Synthetic oligonucleotide
tttctagctcccgggccgtggt

SEQ ID NO: 4987 - DNA, 22 bp, Artificial Sequence
  Description of Artificial Sequence: Synthetic oligonucleotide
atttagattcatcataaggcgt

SEQ ID NO: 4988 - DNA, 22 bp, Artificial Sequence
  Description of Artificial Sequence: Synthetic oligonucleotide
taccaatatcatctgcactggc

SEQ ID NO: 4989 - DNA, 22 bp, Artificial Sequence
  Description of Artificial Sequence: Synthetic oligonucleotide
atatccaataggttcatgtcga

SEQ ID NO: 4990 - DNA, 22 bp, Artificial Sequence
  Description of Artificial Sequence: Synthetic oligonucleotide
tattcaaagcaaatgaattggt

SEQ ID NO: 4991 - DNA, 22 bp, Artificial Sequence
  Description of Artificial Sequence: Synthetic oligonucleotide
ttaattcttggtatcaaagcgt

SEQ ID NO: 4992 - DNA, 22 bp, Artificial Sequence
  Description of Artificial Sequence: Synthetic oligonucleotide
aattcccatgaggaccgcaggt

SEQ ID NO: 4993 - DNA, 22 bp, Artificial Sequence
  Description of Artificial Sequence: Synthetic oligonucleotide
attaacgggcatgttgaatcct

SEQ ID NO: 4994 - DNA, 22 bp, Artificial Sequence
  Description of Artificial Sequence: Synthetic oligonucleotide
atatctgtgggtctttgttggg

SEQ ID NO: 4995 - DNA, 22 bp, Artificial Sequence
  Description of Artificial Sequence: Synthetic oligonucleotide
aatcattgctagctgaactgct

SEQ ID NO: 4996 - DNA, 22 bp, Artificial Sequence
  Description of Artificial Sequence: Synthetic oligonucleotide
ttgtacaagtacagcccttggt

SEQ ID NO: 4997 - DNA, 22 bp, Artificial Sequence
  Description of Artificial Sequence: Synthetic oligonucleotide
taatagtgtctttgaaccggcg

SEQ ID NO: 4998 - DNA, 22 bp, Artificial Sequence
  Description of Artificial Sequence: Synthetic oligonucleotide
ttataatagtgtctttgaaccg

SEQ ID NO: 4999 - DNA, 22 bp, Artificial Sequence
  Description of Artificial Sequence: Synthetic oligonucleotide
ttaatagtcagcacaacatcga

SEQ ID NO: 5000 - DNA, 22 bp, Artificial Sequence
  Description of Artificial Sequence: Synthetic oligonucleotide
ttcagctggaactggatgcggc

SEQ ID NO: 5001 - DNA, 22 bp, Artificial Sequence
  Description of Artificial Sequence: Synthetic oligonucleotide
aattctttacatggtgagtggg

SEQ ID NO: 5002 - DNA, 22 bp, Artificial Sequence
  Description of Artificial Sequence: Synthetic oligonucleotide
ttgcagtagggacacgtttgct

SEQ ID NO: 5003 - DNA, 22 bp, Artificial Sequence
  Description of Artificial Sequence: Synthetic oligonucleotide
ttctatactaagtgcaccaggc

SEQ ID NO: 5004 - DNA, 22 bp, Artificial Sequence
  Description of Artificial Sequence: Synthetic oligonucleotide
ttcaagtcgcctaggactaggg

SEQ ID NO: 5005 - DNA, 22 bp, Artificial Sequence
  Description of Artificial Sequence: Synthetic oligonucleotide
tattccctagaaacccaatgcc

SEQ ID NO: 5006 - DNA, 22 bp, Artificial Sequence
  Description of Artificial Sequence: Synthetic oligonucleotide
tttcctaagccaatattcagcc

SEQ ID NO: 5007 - DNA, 22 bp, Artificial Sequence
  Description of Artificial Sequence: Synthetic oligonucleotide
attctcaggcaaagggtcagct

SEQ ID NO: 5008 - DNA, 22 bp, Artificial Sequence
  Description of Artificial Sequence: Synthetic oligonucleotide
attatctaccacttgctcagga

SEQ ID NO: 5009 - DNA, 22 bp, Artificial Sequence
  Description of Artificial Sequence: Synthetic oligonucleotide
aataccagtggatatatcagct

SEQ ID NO: 5010 - DNA, 22 bp, Artificial Sequence
  Description of Artificial Sequence: Synthetic oligonucleotide
atagaagcaatcaaactgccgg

SEQ ID NO: 5011 - DNA, 22 bp, Artificial Sequence
  Description of Artificial Sequence: Synthetic oligonucleotide
tttgacaattagttccatagct

SEQ ID NO: 5012 - DNA, 22 bp, Artificial Sequence
  Description of Artificial Sequence: Synthetic oligonucleotide
atttcaaacttctgccgcgggc

SEQ ID NO: 5013 - DNA, 22 bp, Artificial Sequence
  Description of Artificial Sequence: Synthetic oligonucleotide
taagtttagaatcttctttggt

SEQ ID NO: 5014 - DNA, 22 bp, Artificial Sequence
  Description of Artificial Sequence: Synthetic oligonucleotide
tttctatgtcgcatacttcggc

SEQ ID NO: 5015 - DNA, 22 bp, Artificial Sequence
  Description of Artificial Sequence: Synthetic oligonucleotide
atacttctggagccatgtaggg

SEQ ID NO: 5016 - DNA, 22 bp, Artificial Sequence
  Description of Artificial Sequence: Synthetic oligonucleotide
ttattccaaacaagaaatgcca

SEQ ID NO: 5017 - DNA, 22 bp, Artificial Sequence
  Description of Artificial Sequence: Synthetic oligonucleotide
attaggagggacaaagaaccgg

SEQ ID NO: 5018 - DNA, 22 bp, Artificial Sequence
  Description of Artificial Sequence: Synthetic oligonucleotide
tattaggagggacaaagaaccg

SEQ ID NO: 5019 - DNA, 22 bp, Artificial Sequence
  Description of Artificial Sequence: Synthetic oligonucleotide
tttactgatggctttcttggct

SEQ ID NO: 5020 - DNA, 22 bp, Artificial Sequence
  Description of Artificial Sequence: Synthetic oligonucleotide
attcatcatcatctacattgca

SEQ ID NO: 5021 - DNA, 22 bp, Artificial Sequence
  Description of Artificial Sequence: Synthetic oligonucleotide
tatagacatgacaaagcatcga

SEQ ID NO: 5022 - DNA, 22 bp, Artificial Sequence
  Description of Artificial Sequence: Synthetic oligonucleotide
attcacgaagggctgctgggct

SEQ ID NO: 5023 - DNA, 22 bp, Artificial Sequence
  Description of Artificial Sequence: Synthetic oligonucleotide
ttatttctgagaagaaggacct

SEQ ID NO: 5024 - DNA, 22 bp, Artificial Sequence
  Description of Artificial Sequence: Synthetic oligonucleotide
tttagttaccaatccaactgct

SEQ ID NO: 5025 - DNA, 22 bp, Artificial Sequence
  Description of Artificial Sequence: Synthetic oligonucleotide
ttaataggtggcctagttccca

SEQ ID NO: 5026 - DNA, 22 bp, Artificial Sequence
  Description of Artificial Sequence: Synthetic oligonucleotide
tatgttaacaagaaactatggt

SEQ ID NO: 5027 - DNA, 22 bp, Artificial Sequence
  Description of Artificial Sequence: Synthetic oligonucleotide
ttaatgttacagtttacagcgt

SEQ ID NO: 5028 - DNA, 22 bp, Artificial Sequence
  Description of Artificial Sequence: Synthetic oligonucleotide
tttcttccagcttctctctggc

SEQ ID NO: 5029 - DNA, 22 bp, Artificial Sequence
  Description of Artificial Sequence: Synthetic oligonucleotide
tttaatagtgagtcagcaaggc

SEQ ID NO: 5030 - DNA, 22 bp, Artificial Sequence
  Description of Artificial Sequence: Synthetic oligonucleotide
tttatttaatagtgagtcagca

SEQ ID NO: 5031 - DNA, 22 bp, Artificial Sequence
  Description of Artificial Sequence: Synthetic oligonucleotide
tttaagacctgtttggtgagct

SEQ ID NO: 5032 - DNA, 22 bp, Artificial Sequence
  Description of Artificial Sequence: Synthetic oligonucleotide
tttctgtaaagctttcaggcgt

SEQ ID NO: 5033 - DNA, 22 bp, Artificial Sequence
  Description of Artificial Sequence: Synthetic oligonucleotide
ttactgtgtgagttccactgga

SEQ ID NO: 5034 - DNA, 22 bp, Artificial Sequence
  Description of Artificial Sequence: Synthetic oligonucleotide
ataaactgcttgctgatggcct

SEQ ID NO: 5035 - DNA, 22 bp, Artificial Sequence
  Description of Artificial Sequence: Synthetic oligonucleotide
aataaactgcttgctgatggcc

SEQ ID NO: 5036 - DNA, 22 bp, Artificial Sequence
  Description of Artificial Sequence: Synthetic oligonucleotide
tattgatggcttgttataagca

SEQ ID NO: 5037 - DNA, 22 bp, Artificial Sequence
  Description of Artificial Sequence: Synthetic oligonucleotide
ttcagaagtacaacagcaaggt

SEQ ID NO: 5038 - DNA, 22 bp, Artificial Sequence
  Description of Artificial Sequence: Synthetic oligonucleotide
tattccaaataaatagtctcga

SEQ ID NO: 5039 - DNA, 22 bp, Artificial Sequence
  Description of Artificial Sequence: Synthetic oligonucleotide
tttaataggttcaccatatcga

SEQ ID NO: 5040 - DNA, 22 bp, Artificial Sequence
  Description of Artificial Sequence: Synthetic oligonucleotide
tttaaataactgagagtgtgct

SEQ ID NO: 5041 - DNA, 22 bp, Artificial Sequence
  Description of Artificial Sequence: Synthetic oligonucleotide
tttctgactgtcataaccaggt

SEQ ID NO: 5042 - DNA, 22 bp, Artificial Sequence
  Description of Artificial Sequence: Synthetic oligonucleotide
ttcttcaaaggatcaaaggcct

SEQ ID NO: 5043 - DNA, 22 bp, Artificial Sequence
  Description of Artificial Sequence: Synthetic oligonucleotide
tacttatacaggatggtctggg

SEQ ID NO: 5044 - DNA, 22 bp, Artificial Sequence
  Description of Artificial Sequence: Synthetic oligonucleotide
ttaatagaaactcgacagaggt

SEQ ID NO: 5045 - DNA, 22 bp, Artificial Sequence
  Description of Artificial Sequence: Synthetic oligonucleotide
atatccattaatagaaactcga

SEQ ID NO: 5046 - DNA, 22 bp, Artificial Sequence
  Description of Artificial Sequence: Synthetic oligonucleotide
tttatcttggatcttaacagca

SEQ ID NO: 5047 - DNA, 22 bp, Artificial Sequence
  Description of Artificial Sequence: Synthetic oligonucleotide
atatttagaaacatcaacacgc

SEQ ID NO: 5048 - DNA, 22 bp, Artificial Sequence
  Description of Artificial Sequence: Synthetic oligonucleotide
tttaatggcaacaatcttcgct

SEQ ID NO: 5049 - DNA, 22 bp, Artificial Sequence
  Description of Artificial Sequence: Synthetic oligonucleotide
taatgtcactatctgttctggt

SEQ ID NO: 5050 - DNA, 22 bp, Artificial Sequence
  Description of Artificial Sequence: Synthetic oligonucleotide
taacaatttcatagggtggcct

SEQ ID NO: 5051 - DNA, 22 bp, Artificial Sequence
  Description of Artificial Sequence: Synthetic oligonucleotide
ataatgagcaaggccagcagga

SEQ ID NO: 5052 - DNA, 22 bp, Artificial Sequence
  Description of Artificial Sequence: Synthetic oligonucleotide
tttagctatgctatcccaaggg

SEQ ID NO: 5053 - DNA, 22 bp, Artificial Sequence
  Description of Artificial Sequence: Synthetic oligonucleotide
ataagaggaacaggagcttccc

SEQ ID NO: 5054 - DNA, 22 bp, Artificial Sequence
  Description of Artificial Sequence: Synthetic oligonucleotide
tttaattcccaccacagatgga

SEQ ID NO: 5055 - DNA, 22 bp, Artificial Sequence
  Description of Artificial Sequence: Synthetic oligonucleotide
ttggatcatacagaaatagccc

SEQ ID NO: 5056 - DNA, 22 bp, Artificial Sequence
  Description of Artificial Sequence: Synthetic oligonucleotide
ataaattcatgcatcattacct

SEQ ID NO: 5057 - DNA, 22 bp, Artificial Sequence
  Description of Artificial Sequence: Synthetic oligonucleotide
tttcaggatccgcatctgcgcc

SEQ ID NO: 5058 - DNA, 22 bp, Artificial Sequence
  Description of Artificial Sequence: Synthetic oligonucleotide
attgtctagcacggccagggca

SEQ ID NO: 5059 - DNA, 22 bp, Artificial Sequence
  Description of Artificial Sequence: Synthetic oligonucleotide
ttcagctgcaggagactttcgg

SEQ ID NO: 5060 - DNA, 22 bp, Artificial Sequence
  Description of Artificial Sequence: Synthetic oligonucleotide
tagtggcaggaagcgagctggt

SEQ ID NO: 5061 - DNA, 22 bp, Artificial Sequence
  Description of Artificial Sequence: Synthetic oligonucleotide
atctgcatacaccagttcagca

SEQ ID NO: 5062 - DNA, 22 bp, Artificial Sequence
  Description of Artificial Sequence: Synthetic oligonucleotide
ttacggacactcacccggtggg

SEQ ID NO: 5063 - DNA, 22 bp, Artificial Sequence
  Description of Artificial Sequence: Synthetic oligonucleotide
atgtacaatgagtttaccagcc

SEQ ID NO: 5064 - DNA, 22 bp, Artificial Sequence
  Description of Artificial Sequence: Synthetic oligonucleotide
taagactttcacttctacgcca

SEQ ID NO: 5065 - DNA, 22 bp, Artificial Sequence
  Description of Artificial Sequence: Synthetic oligonucleotide
tttctggatgagatgtccacgc

SEQ ID NO: 5066 - DNA, 22 bp, Artificial Sequence
  Description of Artificial Sequence: Synthetic oligonucleotide
gaaacagacatgatgatgggcc

SEQ ID NO: 5067 - DNA, 22 bp, Artificial Sequence
  Description of Artificial Sequence: Synthetic oligonucleotide
tttgtgttcagcagggtctctt

SEQ ID NO: 5068 - DNA, 22 bp, Artificial Sequence
  Description of Artificial Sequence: Synthetic oligonucleotide
atcaccaaggagagtctttccg

SEQ ID NO: 5069 - DNA, 22 bp, Artificial Sequence
  Description of Artificial Sequence: Synthetic oligonucleotide
acatcactgaaggtacagaggc

SEQ ID NO: 5070 - DNA, 22 bp, Artificial Sequence
  Description of Artificial Sequence: Synthetic oligonucleotide
aattcttactcttcagggagga

SEQ ID NO: 5071 - DNA, 22 bp, Artificial Sequence
  Description of Artificial Sequence: Synthetic oligonucleotide
tatttcactggtaatctcccgt

SEQ ID NO: 5072 - DNA, 22 bp, Artificial Sequence
  Description of Artificial Sequence: Synthetic oligonucleotide
attcaccagcacgctgtgggca

SEQ ID NO: 5073 - DNA, 22 bp, Artificial Sequence
  Description of Artificial Sequence: Synthetic oligonucleotide
ttctcgtaggaatctgcctcgc

SEQ ID NO: 5074 - DNA, 22 bp, Artificial Sequence
  Description of Artificial Sequence: Synthetic oligonucleotide
attatgtactctactctcccga

SEQ ID NO: 5075 - DNA, 22 bp, Artificial Sequence
  Description of Artificial Sequence: Synthetic oligonucleotide
taatagtattctgtgtgctccc

SEQ ID NO: 5076 - DNA, 22 bp, Artificial Sequence
  Description of Artificial Sequence: Synthetic oligonucleotide
ttcggaaacaagttatgagggc

SEQ ID NO: 5077 - DNA, 22 bp, Artificial Sequence
  Description of Artificial Sequence: Synthetic oligonucleotide
ttgatttctctcttcagctcca

SEQ ID NO: 5078 - DNA, 22 bp, Artificial Sequence
  Description of Artificial Sequence: Synthetic oligonucleotide
ttgagaaagctgttagtttcct

SEQ ID NO: 5079 - DNA, 22 bp, Artificial Sequence
  Description of Artificial Sequence: Synthetic oligonucleotide
atacactgttacagtagtccca

SEQ ID NO: 5080 - DNA, 22 bp, Artificial Sequence
  Description of Artificial Sequence: Synthetic oligonucleotide
ttaatacaggaggcatctagct

SEQ ID NO: 5081 - DNA, 22 bp, Artificial Sequence
  Description of Artificial Sequence: Synthetic oligonucleotide
ttggaaatccagttagtccgca

SEQ ID NO: 5082 - DNA, 22 bp, Artificial Sequence
  Description of Artificial Sequence: Synthetic oligonucleotide
atttgacatgtcccaataaggt

SEQ ID NO: 5083 - DNA, 22 bp, Artificial Sequence
  Description of Artificial Sequence: Synthetic oligonucleotide
ttatcctctaatccagtctgct

SEQ ID NO: 5084 - DNA, 22 bp, Artificial Sequence
  Description of Artificial Sequence: Synthetic oligonucleotide
ttaggagttcaagtctataggt

SEQ ID NO: 5085 - DNA, 22 bp, Artificial Sequence
  Description of Artificial Sequence: Synthetic oligonucleotide
taacagtagtactttctttcca

SEQ ID NO: 5086 - DNA, 22 bp, Artificial Sequence
  Description of Artificial Sequence: Synthetic oligonucleotide
atacaagttgaaggtctccttg

SEQ ID NO: 5087 - DNA, 22 bp, Artificial Sequence
  Description of Artificial Sequence: Synthetic oligonucleotide
attagttataccactgtcaccg

SEQ ID NO: 5088 - DNA, 22 bp, Artificial Sequence
  Description of Artificial Sequence: Synthetic oligonucleotide
aaccattccgagtaagaggccc

SEQ ID NO: 5089 - DNA, 22 bp, Artificial Sequence
  Description of Artificial Sequence: Synthetic oligonucleotide
attatctggaccatgttggcca

SEQ ID NO: 5090 - DNA, 22 bp, Artificial Sequence
  Description of Artificial Sequence: Synthetic oligonucleotide
gaatgaatgctgttcaggatct

SEQ ID NO: 5091 - DNA, 22 bp, Artificial Sequence
  Description of Artificial Sequence: Synthetic oligonucleotide
tttcattgaccaacaacatggg

SEQ ID NO: 5092 - DNA, 22 bp, Artificial Sequence
  Description of Artificial Sequence: Synthetic oligonucleotide
ttgggagaagtgcgggtgaggc

SEQ ID NO: 5093 - DNA, 22 bp, Artificial Sequence
  Description of Artificial Sequence: Synthetic oligonucleotide
ttggagcagcaggcgtgcaggg

SEQ ID NO: 5094 - DNA, 22 bp, Artificial Sequence
  Description of Artificial Sequence: Synthetic oligonucleotide
tttattcaaacaacagagccga

SEQ ID NO: 5095 - DNA, 22 bp, Artificial Sequence
  Description of Artificial Sequence: Synthetic oligonucleotide
tttattagagcgagagtcccga

SEQ ID NO: 5096 - DNA, 22 bp, Artificial Sequence
  Description of Artificial Sequence: Synthetic oligonucleotide
atattccttgtatttcccgccc

SEQ ID NO: 5097 - DNA, 22 bp, Artificial Sequence
  Description of Artificial Sequence: Synthetic oligonucleotide
atagtaatagaggttgaaggtc

SEQ ID NO: 5098 - DNA, 22 bp, Artificial Sequence
  Description of Artificial Sequence: Synthetic oligonucleotide
atgaggttcagcacacacaggt

SEQ ID NO: 5099 - DNA, 22 bp, Artificial Sequence
  Description of Artificial Sequence: Synthetic oligonucleotide
ttcttacaccaaataggcacgt

SEQ ID NO: 5100 - DNA, 22 bp, Artificial Sequence
  Description of Artificial Sequence: Synthetic oligonucleotide
atttggccgaacttgggccggt

SEQ ID NO: 5101 - DNA, 22 bp, Artificial Sequence
  Description of Artificial Sequence: Synthetic oligonucleotide
tttaagacgttgcttgtcagct

SEQ ID NO: 5102 - DNA, 22 bp, Artificial Sequence
  Description of Artificial Sequence: Synthetic oligonucleotide
ttatgacagcaccaagggcggg

SEQ ID NO: 5103 - DNA, 22 bp, Artificial Sequence
  Description of Artificial Sequence: Synthetic oligonucleotide
gtttgtggtgatattcacggcc

SEQ ID NO: 5104 - DNA, 22 bp, Artificial Sequence
  Description of Artificial Sequence: Synthetic oligonucleotide
tatgcgttgaatgtttagaggc

SEQ ID NO: 5105 - DNA, 22 bp, Artificial Sequence
  Description of Artificial Sequence: Synthetic oligonucleotide
taagaggtagtgtatgctagct

SEQ ID NO: 5106 - DNA, 22 bp, Artificial Sequence
  Description of Artificial Sequence: Synthetic oligonucleotide
tttgatctacagacatagggca

SEQ ID NO: 5107 - DNA, 22 bp, Artificial Sequence
  Description of Artificial Sequence: Synthetic oligonucleotide
atttacatccagttctactgct

SEQ ID NO: 5108 - DNA, 22 bp, Artificial Sequence
  Description of Artificial Sequence: Synthetic oligonucleotide
tttgtgctacagactaaatcca

SEQ ID NO: 5109 - DNA, 22 bp, Artificial Sequence
  Description of Artificial Sequence: Synthetic oligonucleotide
ttgggtgttcccagtccgaggc

SEQ ID NO: 5110 - DNA, 22 bp, Artificial Sequence
  Description of Artificial Sequence: Synthetic oligonucleotide
aatagacatgatcgataatggt

SEQ ID NO: 5111 - DNA, 22 bp, Artificial Sequence
  Description of Artificial Sequence: Synthetic oligonucleotide
tttgctgattggaatgtgaggt

SEQ ID NO: 5112 - DNA, 22 bp, Artificial Sequence
  Description of Artificial Sequence: Synthetic oligonucleotide
ttcaggtcagccagggtgtggt

SEQ ID NO: 5113 - DNA, 22 bp, Artificial Sequence
  Description of Artificial Sequence: Synthetic oligonucleotide
ttaggtcataaataaacaggca

SEQ ID NO: 5114 - DNA, 22 bp, Artificial Sequence
  Description of Artificial Sequence: Synthetic oligonucleotide
atagactttggagtaagtggct

SEQ ID NO: 5115 - DNA, 22 bp, Artificial Sequence
  Description of Artificial Sequence: Synthetic oligonucleotide
tttagttggatctttcacccgc

SEQ ID NO: 5116 - DNA, 22 bp, Artificial Sequence
  Description of Artificial Sequence: Synthetic oligonucleotide
aagaactttaggagaaagtggt

SEQ ID NO: 5117 - DNA, 22 bp, Artificial Sequence
  Description of Artificial Sequence: Synthetic oligonucleotide
tttcttgagatcatcccaggcc

SEQ ID NO: 5118 - DNA, 22 bp, Artificial Sequence
  Description of Artificial Sequence: Synthetic oligonucleotide
taacgtatttatccacttcggt

SEQ ID NO: 5119 - DNA, 22 bp, Artificial Sequence
  Description of Artificial Sequence: Synthetic oligonucleotide
ttaaagatgcaacttgcatcca

SEQ ID NO: 5120 - DNA, 22 bp, Artificial Sequence
  Description of Artificial Sequence: Synthetic oligonucleotide
ttaagtgaagtgctgctatggc

SEQ ID NO: 5121 - DNA, 22 bp, Artificial Sequence
  Description of Artificial Sequence: Synthetic oligonucleotide
tatgatgggttgattcacgggc

SEQ ID NO: 5122 - DNA, 22 bp, Artificial Sequence
  Description of Artificial Sequence: Synthetic oligonucleotide
aataatgttctcattatgtggt

SEQ ID NO: 5123 - DNA, 22 bp, Artificial Sequence
  Description of Artificial Sequence: Synthetic oligonucleotide
atcaactcagtttgtttagcgg

SEQ ID NO: 5124 - DNA, 22 bp, Artificial Sequence
  Description of Artificial Sequence: Synthetic oligonucleotide
tttgctctacctacttactgcc

SEQ ID NO: 5125 - DNA, 22 bp, Artificial Sequence
  Description of Artificial Sequence: Synthetic oligonucleotide
ttgttcatgtacttcatggcgt

SEQ ID NO: 5126 - DNA, 22 bp, Artificial Sequence
  Description of Artificial Sequence: Synthetic oligonucleotide
atccaggagaatgttgtcaggc

SEQ ID NO: 5127 - DNA, 22 bp, Artificial Sequence
  Description of Artificial Sequence: Synthetic oligonucleotide
aatttctttggcaaactctcgc

SEQ ID NO: 5128 - DNA, 22 bp, Artificial Sequence
  Description of Artificial Sequence: Synthetic oligonucleotide
attataggaaatgtcctggcgg

SEQ ID NO: 5129 - DNA, 22 bp, Artificial Sequence
  Description of Artificial Sequence: Synthetic oligonucleotide
tactgtatttactccgtctccg

SEQ ID NO: 5130 - DNA, 22 bp, Artificial Sequence
  Description of Artificial Sequence: Synthetic oligonucleotide
tattagtaacgcatgcaagcag

SEQ ID NO: 5131 - DNA, 22 bp, Artificial Sequence
  Description of Artificial Sequence: Synthetic oligonucleotide
ttagtgatagatactgttccct

SEQ ID NO: 5132 - DNA, 22 bp, Artificial Sequence
  Description of Artificial Sequence: Synthetic oligonucleotide
ttatcatcaaagcccttgtcgg

SEQ ID NO: 5133 - DNA, 22 bp, Artificial Sequence
  Description of Artificial Sequence: Synthetic oligonucleotide
attctcattcagcttacttgca

SEQ ID NO: 5134 - DNA, 22 bp, Artificial Sequence
  Description of Artificial Sequence: Synthetic oligonucleotide
ctcagtgatgatcatcatgggc

SEQ ID NO: 5135 - DNA, 22 bp, Artificial Sequence
  Description of Artificial Sequence: Synthetic oligonucleotide
ctcaatgaagatacgctcagcc

SEQ ID NO: 5136 - DNA, 22 bp, Artificial Sequence
  Description of Artificial Sequence: Synthetic oligonucleotide
attagaaaccatttgagagccc

SEQ ID NO: 5137 - DNA, 22 bp, Artificial Sequence
  Description of Artificial Sequence: Synthetic oligonucleotide
taatagaatcaactccagtggc

SEQ ID NO: 5138 - DNA, 22 bp, Artificial Sequence
  Description of Artificial Sequence: Synthetic oligonucleotide
tatagtgagcaatgtgtcccgt

SEQ ID NO: 5139 - DNA, 22 bp, Artificial Sequence
  Description of Artificial Sequence: Synthetic oligonucleotide
tttaaccagccctgtctgtcct

SEQ ID NO: 5140 - DNA, 22 bp, Artificial Sequence
  Description of Artificial Sequence: Synthetic oligonucleotide
tatttcttgttctcgtagacgt

SEQ ID NO: 5141 - DNA, 22 bp, Artificial Sequence
  Description of Artificial Sequence: Synthetic oligonucleotide
attaataagcagattcatggca

SEQ ID NO: 5142 - DNA, 22 bp, Artificial Sequence
  Description of Artificial Sequence: Synthetic oligonucleotide
ttaaattctgaaacaaacagga

SEQ ID NO: 5143 - DNA, 22 bp, Artificial Sequence
  Description of Artificial Sequence: Synthetic oligonucleotide
atgtatttctaatgcgatagcg

SEQ ID NO: 5144 - DNA, 22 bp, Artificial Sequence
  Description of Artificial Sequence: Synthetic oligonucleotide
tacacttaacatttattcacct

SEQ ID NO: 5145 - DNA, 22 bp, Artificial Sequence
  Description of Artificial Sequence: Synthetic oligonucleotide
taatgccagcattggagttgga

SEQ ID NO: 5146 - DNA, 22 bp, Artificial Sequence
  Description of Artificial Sequence: Synthetic oligonucleotide
attaaggttaagattaatgcca

SEQ ID NO: 5147 - DNA, 22 bp, Artificial Sequence
  Description of Artificial Sequence: Synthetic oligonucleotide
attatccaccagggtagaaggg

SEQ ID NO: 5148 - DNA, 22 bp, Artificial Sequence
  Description of Artificial Sequence: Synthetic oligonucleotide
atagttcatgagacagagaggc

SEQ ID NO: 5149 - DNA, 22 bp, Artificial Sequence
  Description of Artificial Sequence: Synthetic oligonucleotide
catcttgagaacatcaggtcca

SEQ ID NO: 5150 - DNA, 22 bp, Artificial Sequence
  Description of Artificial Sequence: Synthetic oligonucleotide
ctataaagtcagcttcaaaccc

SEQ ID NO: 5151 - DNA, 22 bp, Artificial Sequence
  Description of Artificial Sequence: Synthetic oligonucleotide
atagcacataaattagggagtg

SEQ ID NO: 5152 - DNA, 22 bp, Artificial Sequence
  Description of Artificial Sequence: Synthetic oligonucleotide
ttgttgatggcttcaatcagct

SEQ ID NO: 5153 - DNA, 22 bp, Artificial Sequence
  Description of Artificial Sequence: Synthetic oligonucleotide
ttaatcctccgtacagtcacgt

SEQ ID NO: 5154 - DNA, 22 bp, Artificial Sequence
  Description of Artificial Sequence: Synthetic oligonucleotide
aagagtttggagacatgcagct

SEQ ID NO: 5155 - DNA, 22 bp, Artificial Sequence
  Description of Artificial Sequence: Synthetic oligonucleotide
tttgggatgaacttcagggcca

SEQ ID NO: 5156 - DNA, 22 bp, Artificial Sequence
  Description of Artificial Sequence: Synthetic oligonucleotide
atatcctatatgtctgtccgaa

SEQ ID NO: 5157 - DNA, 22 bp, Artificial Sequence
  Description of Artificial Sequence: Synthetic oligonucleotide
tatttgtatcaggattccagca

SEQ ID NO: 5158 - DNA, 22 bp, Artificial Sequence
  Description of Artificial Sequence: Synthetic oligonucleotide
atatcattccatccaataccgc

SEQ ID NO: 5159 - DNA, 22 bp, Artificial Sequence
  Description of Artificial Sequence: Synthetic oligonucleotide
ttgtcagagacacttagctgct

SEQ ID NO: 5160 - DNA, 22 bp, Artificial Sequence
  Description of Artificial Sequence: Synthetic oligonucleotide
aataatatgtcagtcaactgct

SEQ ID NO: 5161 - DNA, 22 bp, Artificial Sequence
  Description of Artificial Sequence: Synthetic oligonucleotide
tttaataacgttaaatcgtcca

SEQ ID NO: 5162 - DNA, 22 bp, Artificial Sequence
  Description of Artificial Sequence: Synthetic oligonucleotide
atcttcgagtcctcaaagggcg

SEQ ID NO: 5163 - DNA, 22 bp, Artificial Sequence
  Description of Artificial Sequence: Synthetic oligonucleotide
tttctgctccaagagctctggg

SEQ ID NO: 5164 - DNA, 22 bp, Artificial Sequence
  Description of Artificial Sequence: Synthetic oligonucleotide
aaggagagtcaaactcatagct

SEQ ID NO: 5165 - DNA, 22 bp, Artificial Sequence
  Description of Artificial Sequence: Synthetic oligonucleotide
tttccaggccacagtggctggc

SEQ ID NO: 5166 - DNA, 22 bp, Artificial Sequence
  Description of Artificial Sequence: Synthetic oligonucleotide
atttggttcccagatgtctggg

SEQ ID NO: 5167 - DNA, 22 bp, Artificial Sequence
  Description of Artificial Sequence: Synthetic oligonucleotide
atactgttctgcaatattggcc

SEQ ID NO: 5168 - DNA, 22 bp, Artificial Sequence
  Description of Artificial Sequence: Synthetic oligonucleotide
ttgatttaagtgagtaactctg

SEQ ID NO: 5169 - DNA, 22 bp, Artificial Sequence
  Description of Artificial Sequence: Synthetic oligonucleotide
aatgcctataccatcatgagcc

SEQ ID NO: 5170 - DNA, 22 bp, Artificial Sequence
  Description of Artificial Sequence: Synthetic oligonucleotide
ttcttccatgtagacttgagct

SEQ ID NO: 5171 - DNA, 22 bp, Artificial Sequence
  Description of Artificial Sequence: Synthetic oligonucleotide
atgagttaacaggaattaactc

SEQ ID NO: 5172 - DNA, 22 bp, Artificial Sequence
  Description of Artificial Sequence: Synthetic oligonucleotide
tagatctatgccattctttcct

SEQ ID NO: 5173 - DNA, 22 bp, Artificial Sequence
  Description of Artificial Sequence: Synthetic oligonucleotide
tcaacatatcacaaatgtgctg

SEQ ID NO: 5174 - DNA, 22 bp, Artificial Sequence
  Description of Artificial Sequence: Synthetic oligonucleotide
attgctattaaggtgttatgga

SEQ ID NO: 5175 - DNA, 22 bp, Artificial Sequence
  Description of Artificial Sequence: Synthetic oligonucleotide
ttgatgaaagatgctgtcaccg

SEQ ID NO: 5176 - DNA, 22 bp, Artificial Sequence
  Description of Artificial Sequence: Synthetic oligonucleotide
gttggatcagctggacagggcc

SEQ ID NO: 5177 - DNA, 22 bp, Artificial Sequence
  Description of Artificial Sequence: Synthetic oligonucleotide
gactgtagaaactcactcagga

SEQ ID NO: 5178 - DNA, 22 bp, Artificial Sequence
  Description of Artificial Sequence: Synthetic oligonucleotide
ttaatgtaatactccaggagct

SEQ ID NO: 5179 - DNA, 22 bp, Artificial Sequence
  Description of Artificial Sequence: Synthetic oligonucleotide
taaatccactaactgttccggg

SEQ ID NO: 5180 - DNA, 22 bp, Artificial Sequence
  Description of Artificial Sequence: Synthetic oligonucleotide
tttctctaagaggaatcgggca

SEQ ID NO: 5181 - DNA, 22 bp, Artificial Sequence
  Description of Artificial Sequence: Synthetic oligonucleotide
aatattgacaatttccagtcct

SEQ ID NO: 5182 - DNA, 22 bp, Artificial Sequence
  Description of Artificial Sequence: Synthetic oligonucleotide
tagctgtgtgcggagaaggcgg

SEQ ID NO: 5183 - DNA, 22 bp, Artificial Sequence
  Description of Artificial Sequence: Synthetic oligonucleotide
taataaatggcagcaaagtggt

SEQ ID NO: 5184 - DNA, 22 bp, Artificial Sequence
  Description of Artificial Sequence: Synthetic oligonucleotide
ttatgtagtagattattgtcca

SEQ ID NO: 5185 - DNA, 22 bp, Artificial Sequence
  Description of Artificial Sequence: Synthetic oligonucleotide
ttctgtgttgccatatacagca

SEQ ID NO: 5186 - DNA, 22 bp, Artificial Sequence
  Description of Artificial Sequence: Synthetic oligonucleotide
aattgatgccaagaattgtcca

SEQ ID NO: 5187 - DNA, 22 bp, Artificial Sequence
  Description of Artificial Sequence: Synthetic oligonucleotide
attatgctaaagtgcatttcct

SEQ ID NO: 5188 - DNA, 22 bp, Artificial Sequence
  Description of Artificial Sequence: Synthetic oligonucleotide
gataaccatgaattggagacct

SEQ ID NO: 5189 - DNA, 22 bp, Artificial Sequence
  Description of Artificial Sequence: Synthetic oligonucleotide
taatatacatttataacgggcc

SEQ ID NO: 5190 - DNA, 22 bp, Artificial Sequence
  Description of Artificial Sequence: Synthetic oligonucleotide
atatacatttataacgggcctg

SEQ ID NO: 5191 - DNA, 22 bp, Artificial Sequence
  Description of Artificial Sequence: Synthetic oligonucleotide
ataccataagagaacacatctg

SEQ ID NO: 5192 - DNA, 22 bp, Artificial Sequence
  Description of Artificial Sequence: Synthetic oligonucleotide
ttctcatccctctttatcaggc

SEQ ID NO: 5193 - DNA, 22 bp, Artificial Sequence
  Description of Artificial Sequence: Synthetic oligonucleotide
ttaacctcagaatatttcagga

SEQ ID NO: 5194 - DNA, 22 bp, Artificial Sequence
  Description of Artificial Sequence: Synthetic oligonucleotide
caaaggtaggaatctcacaggc

SEQ ID NO: 5195 - DNA, 22 bp, Artificial Sequence
  Description of Artificial Sequence: Synthetic oligonucleotide
tataacaatcaacacctgtggc

SEQ ID NO: 5196 - DNA, 22 bp, Artificial Sequence
  Description of Artificial Sequence: Synthetic oligonucleotide
ctcaagtaaggcaaagtggtgc

SEQ ID NO: 5197 - DNA, 22 bp, Artificial Sequence
  Description of Artificial Sequence: Synthetic oligonucleotide
ttaaccgacactggcatcagcg

SEQ ID NO: 5198 - DNA, 22 bp, Artificial Sequence
  Description of Artificial Sequence: Synthetic oligonucleotide
gtaacttacaataggagccgcc

SEQ ID NO: 5199 - DNA, 22 bp, Artificial Sequence
  Description of Artificial Sequence: Synthetic oligonucleotide
ttcacttccaatattctctgct

SEQ ID NO: 5200 - DNA, 22 bp, Artificial Sequence
  Description of Artificial Sequence: Synthetic oligonucleotide
aatactttctaaagactctgtt

SEQ ID NO: 5201 - DNA, 22 bp, Artificial Sequence
  Description of Artificial Sequence: Synthetic oligonucleotide
tttgctttggattcaaagtcct

SEQ ID NO: 5202 - DNA, 22 bp, Artificial Sequence
  Description of Artificial Sequence: Synthetic oligonucleotide
gtttctcttcatataaacatct

SEQ ID NO: 5203 - DNA, 22 bp, Artificial Sequence
  Description of Artificial Sequence: Synthetic oligonucleotide
ttatggtatgagtttcatatac

SEQ ID NO: 5204 - DNA, 22 bp, Artificial Sequence
  Description of Artificial Sequence: Synthetic oligonucleotide
tattcgaattaaattatggtat

SEQ ID NO: 5205 - DNA, 22 bp, Artificial Sequence
  Description of Artificial Sequence: Synthetic oligonucleotide
atttgttgaggctttagctcca

SEQ ID NO: 5206 - DNA, 22 bp, Artificial Sequence
  Description of Artificial Sequence: Synthetic oligonucleotide
tttcaataagaagtttcttgct

SEQ ID NO: 5207 - DNA, 22 bp, Artificial Sequence
  Description of Artificial Sequence: Synthetic oligonucleotide
tttgttgttcatctatttgccg

SEQ ID NO: 5208 - DNA, 22 bp, Artificial Sequence
  Description of Artificial Sequence: Synthetic oligonucleotide
atggcaataaatatttgttgct

SEQ ID NO: 5209 - DNA, 22 bp, Artificial Sequence
  Description of Artificial Sequence: Synthetic oligonucleotide
atgtcactgccctgggtggccc

SEQ ID NO: 5210 - DNA, 22 bp, Artificial Sequence
  Description of Artificial Sequence: Synthetic oligonucleotide
tttaacactgaggcatcctggc

SEQ ID NO: 5211 - DNA, 22 bp, Artificial Sequence
  Description of Artificial Sequence: Synthetic oligonucleotide
agaataaatcacatggtgacag

SEQ ID NO: 5212 - DNA, 22 bp, Artificial Sequence
  Description of Artificial Sequence: Synthetic oligonucleotide
atatccaagtaatgggtaaggc

SEQ ID NO: 5213 - DNA, 22 bp, Artificial Sequence
  Description of Artificial Sequence: Synthetic oligonucleotide
ttaacatttgactcacaaaggg

SEQ ID NO: 5214 - DNA, 22 bp, Artificial Sequence
  Description of Artificial Sequence: Synthetic oligonucleotide
atctatgatgtgacagtaacct

SEQ ID NO: 5215 - DNA, 22 bp, Artificial Sequence
  Description of Artificial Sequence: Synthetic oligonucleotide
atgcatgtagatgtactcccgg

SEQ ID NO: 5216 - DNA, 22 bp, Artificial Sequence
  Description of Artificial Sequence: Synthetic oligonucleotide
gaattaaggcggtttgtcccgt

SEQ ID NO: 5217 - DNA, 22 bp, Artificial Sequence
  Description of Artificial Sequence: Synthetic oligonucleotide
ttcattgctgtgatcattcgcc

SEQ ID NO: 5218 - DNA, 22 bp, Artificial Sequence
  Description of Artificial Sequence: Synthetic oligonucleotide
caaaccatagaatttatgatgc

SEQ ID NO: 5219 - DNA, 22 bp, Artificial Sequence
  Description of Artificial Sequence: Synthetic oligonucleotide
tttccagaacactgtatgctgc

SEQ ID NO: 5220 - DNA, 22 bp, Artificial Sequence
  Description of Artificial Sequence: Synthetic oligonucleotide
gatgtcaatgatgttgagtggc

SEQ ID NO: 5221 - DNA, 22 bp, Artificial Sequence
  Description of Artificial Sequence: Synthetic oligonucleotide
ttatagaagccctgtgcaacag

SEQ ID NO: 5222 - DNA, 22 bp, Artificial Sequence
  Description of Artificial Sequence: Synthetic oligonucleotide
tatactttacatcctgattgcc

SEQ ID NO: 5223 - DNA, 22 bp, Artificial Sequence
  Description of Artificial Sequence: Synthetic oligonucleotide
ctggaatataagagcaattccg

SEQ ID NO: 5224 - DNA, 22 bp, Artificial Sequence
  Description of Artificial Sequence: Synthetic oligonucleotide
taagagcaattccgaaacactg

SEQ ID NO: 5225 - DNA, 22 bp, Artificial Sequence
  Description of Artificial Sequence: Synthetic oligonucleotide
attctgtatcactctgcaggcc

SEQ ID NO: 5226 - DNA, 22 bp, Artificial Sequence
  Description of Artificial Sequence: Synthetic oligonucleotide
atatccaaaccgccgaagcggg

SEQ ID NO: 5227 - DNA, 22 bp, Artificial Sequence
  Description of Artificial Sequence: Synthetic oligonucleotide
aataaataccgaggaatgtcgg

SEQ ID NO: 5228 - DNA, 22 bp, Artificial Sequence
  Description of Artificial Sequence: Synthetic oligonucleotide
attctcttagaccttattccaa

SEQ ID NO: 5229 - DNA, 22 bp, Artificial Sequence
  Description of Artificial Sequence: Synthetic oligonucleotide
ttctgcaaccagagataactcc

SEQ ID NO: 5230 - DNA, 22 bp, Artificial Sequence
  Description of Artificial Sequence: Synthetic oligonucleotide
attgatgaggatgttagctccc

SEQ ID NO: 5231 - DNA, 22 bp, Artificial Sequence
  Description of Artificial Sequence: Synthetic oligonucleotide
tttcacaatggtctcaaaggcc

SEQ ID NO: 5232 - DNA, 22 bp, Artificial Sequence
  Description of Artificial Sequence: Synthetic oligonucleotide
atatcgatgagaagcatgacct

SEQ ID NO: 5233 - DNA, 22 bp, Artificial Sequence
  Description of Artificial Sequence: Synthetic oligonucleotide
atgtaataaggcaggatggcca

SEQ ID NO: 5234 - DNA, 22 bp, Artificial Sequence
  Description of Artificial Sequence: Synthetic oligonucleotide
caatgagagcatcttgggtcct

SEQ ID NO: 5235 - DNA, 22 bp, Artificial Sequence
  Description of Artificial Sequence: Synthetic oligonucleotide
atttctgtagaagagtttcctg

SEQ ID NO: 5236 - DNA, 22 bp, Artificial Sequence
  Description of Artificial Sequence: Synthetic oligonucleotide
aattgcattaagatattgtggc

SEQ ID NO: 5237 - DNA, 22 bp, Artificial Sequence
  Description of Artificial Sequence: Synthetic oligonucleotide
atatactggtagatcctctggc

SEQ ID NO: 5238 - DNA, 22 bp, Artificial Sequence
  Description of Artificial Sequence: Synthetic oligonucleotide
atttcctaggaaaccatctggg

SEQ ID NO: 5239 - DNA, 22 bp, Artificial Sequence
  Description of Artificial Sequence: Synthetic oligonucleotide
atattcatggccaacatctggc

SEQ ID NO: 5240 - DNA, 22 bp, Artificial Sequence
  Description of Artificial Sequence: Synthetic oligonucleotide
ttggtgcaggccttgagctggc

SEQ ID NO: 5241 - DNA, 22 bp, Artificial Sequence
  Description of Artificial Sequence: Synthetic oligonucleotide
gattaccacactattctgctgc

SEQ ID NO: 5242 - DNA, 22 bp, Artificial Sequence
  Description of Artificial Sequence: Synthetic oligonucleotide
aagatttaaggcaagttcgggc

SEQ ID NO: 5243 - DNA, 22 bp, Artificial Sequence
  Description of Artificial Sequence: Synthetic oligonucleotide
attctcaatggtgtcactcggc

SEQ ID NO: 5244 - DNA, 22 bp, Artificial Sequence
  Description of Artificial Sequence: Synthetic oligonucleotide
aattcacatcagagctggcggc

SEQ ID NO: 5245 - DNA, 22 bp, Artificial Sequence
  Description of Artificial Sequence: Synthetic oligonucleotide
atccacctgtacttgcagcggg

SEQ ID NO: 5246 - DNA, 22 bp, Artificial Sequence
  Description of Artificial Sequence: Synthetic oligonucleotide
atgatgaaggtgttgggccggg

SEQ ID NO: 5247 - DNA, 22 bp, Artificial Sequence
  Description of Artificial Sequence: Synthetic oligonucleotide
taatggtagaagagggaacggg

SEQ ID NO: 5248 - DNA, 22 bp, Artificial Sequence
  Description of Artificial Sequence: Synthetic oligonucleotide
ataatctggtgcatcattaggg

SEQ ID NO: 5249 - DNA, 22 bp, Artificial Sequence
  Description of Artificial Sequence: Synthetic oligonucleotide
ttcctccagctgtaggataggg

SEQ ID NO: 5250 - DNA, 22 bp, Artificial Sequence
  Description of Artificial Sequence: Synthetic oligonucleotide
tttccaattcctttgcataggg

SEQ ID NO: 5251 - DNA, 22 bp, Artificial Sequence
  Description of Artificial Sequence: Synthetic oligonucleotide
tctaagtcaaacagtctgtgtt

SEQ ID NO: 5252 - DNA, 22 bp, Artificial Sequence
  Description of Artificial Sequence: Synthetic oligonucleotide
atatagcagcggcggtggtggc

SEQ ID NO: 5253 - DNA, 22 bp, Artificial Sequence
  Description of Artificial Sequence: Synthetic oligonucleotide
tttgtcagtgatgacggcaggc

SEQ ID NO: 5254 - DNA, 22 bp, Artificial Sequence
  Description of Artificial Sequence: Synthetic oligonucleotide
ttgaaataggagctctccaggc

SEQ ID NO: 5255 - DNA, 22 bp, Artificial Sequence
  Description of Artificial Sequence: Synthetic oligonucleotide
ttactgtttgaaatccaaaggg

SEQ ID NO: 5256 - DNA, 22 bp, Artificial Sequence
  Description of Artificial Sequence: Synthetic oligonucleotide
ttccagtagcctattctcttcg

SEQ ID NO: 5257 - DNA, 22 bp, Artificial Sequence
  Description of Artificial Sequence: Synthetic oligonucleotide
atgttggagctgagcgaggcgc

SEQ ID NO: 5258 - DNA, 22 bp, Artificial Sequence
  Description of Artificial Sequence: Synthetic oligonucleotide
tatcaattccagaaacatccgg

SEQ ID NO: 5259 - DNA, 22 bp, Artificial Sequence
  Description of Artificial Sequence: Synthetic oligonucleotide
atcatttaaccgtctgcatgcc

SEQ ID NO: 5260 - DNA, 22 bp, Artificial Sequence
  Description of Artificial Sequence: Synthetic oligonucleotide
attgccgttgcagtacatggcc

SEQ ID NO: 5261 - DNA, 22 bp, Artificial Sequence
  Description of Artificial Sequence: Synthetic oligonucleotide
ttctccattgatgtcctcggcc

SEQ ID NO: 5262 - DNA, 22 bp, Artificial Sequence
  Description of Artificial Sequence: Synthetic oligonucleotide
atatcagggcgcactgtgagcc

SEQ ID NO: 5263 - DNA, 22 bp, Artificial Sequence
  Description of Artificial Sequence: Synthetic oligonucleotide
ttagagaaagacttgggaagcc

SEQ ID NO: 5264 - DNA, 22 bp, Artificial Sequence
  Description of Artificial Sequence: Synthetic oligonucleotide
attcttacagaacgaatgtccg

SEQ ID NO: 5265 - DNA, 22 bp, Artificial Sequence
  Description of Artificial Sequence: Synthetic oligonucleotide
ttacattcatagggtttctccc

SEQ ID NO: 5266 - DNA, 22 bp, Artificial Sequence
  Description of Artificial Sequence: Synthetic oligonucleotide
ttgaggatggtgttgatctccc

SEQ ID NO: 5267 - DNA, 22 bp, Artificial Sequence
  Description of Artificial Sequence: Synthetic oligonucleotide
aactccttggcttctttggccc

SEQ ID NO: 5268 - DNA, 22 bp, Artificial Sequence
  Description of Artificial Sequence: Synthetic oligonucleotide
ttccctttggatctcctggccc

SEQ ID NO: 5269 - DNA, 22 bp, Artificial Sequence
  Description of Artificial Sequence: Synthetic oligonucleotide
atgtggtactggctcatggccc

SEQ ID NO: 5270 - DNA, 22 bp, Artificial Sequence
  Description of Artificial Sequence: Synthetic oligonucleotide
tttcacacgcgaaataggcctg

SEQ ID NO: 5271 - DNA, 22 bp, Artificial Sequence
  Description of Artificial Sequence: Synthetic oligonucleotide
attccttatggcgcacaggtag

SEQ ID NO: 5272 - DNA, 22 bp, Artificial Sequence
  Description of Artificial Sequence: Synthetic oligonucleotide
ttgttccagggatgtacttctt

SEQ ID NO: 5273 - DNA, 22 bp, Artificial Sequence
  Description of Artificial Sequence: Synthetic oligonucleotide
tgaactgttacgataaacaccc

SEQ ID NO: 5274 - DNA, 22 bp, Artificial Sequence
  Description of Artificial Sequence: Synthetic oligonucleotide
atttctgagccctatacttggt

SEQ ID NO: 5275 - DNA, 22 bp, Artificial Sequence
  Description of Artificial Sequence: Synthetic oligonucleotide
aacaactttcccagcttctggt

SEQ ID NO: 5276 - DNA, 22 bp, Artificial Sequence
  Description of Artificial Sequence: Synthetic oligonucleotide
tttgcatatcgaaacctctgga

SEQ ID NO: 5277 - DNA, 22 bp, Artificial Sequence
  Description of Artificial Sequence: Synthetic oligonucleotide
aataacaccataataatctggt

SEQ ID NO: 5278 - DNA, 22 bp, Artificial Sequence
  Description of Artificial Sequence: Synthetic oligonucleotide
atttataagcatcagtcatggt

SEQ ID NO: 5279 - DNA, 22 bp, Artificial Sequence
  Description of Artificial Sequence: Synthetic oligonucleotide
tgtcagtttcagatggcctcgt

SEQ ID NO: 5280 - DNA, 22 bp, Artificial Sequence
  Description of Artificial Sequence: Synthetic oligonucleotide
tttgagtagaagaatcgtcggt

SEQ ID NO: 5281 - DNA, 22 bp, Artificial Sequence
  Description of Artificial Sequence: Synthetic oligonucleotide
tagacggtggacaaggatcgga

SEQ ID NO: 5282 - DNA, 22 bp, Artificial Sequence
  Description of Artificial Sequence: Synthetic oligonucleotide
ggtagtaatcactaaatgaggt

SEQ ID NO: 5283 - DNA, 22 bp, Artificial Sequence
  Description of Artificial Sequence: Synthetic oligonucleotide
tcatatcttcacttacaggctt

SEQ ID NO: 5284 - DNA, 22 bp, Artificial Sequence
  Description of Artificial Sequence: Synthetic oligonucleotide
aattcactggattctctagcac

SEQ ID NO: 5285 - DNA, 22 bp, Artificial Sequence
  Description of Artificial Sequence: Synthetic oligonucleotide
atactgtccaatgaaatttgga

SEQ ID NO: 5286 - DNA, 22 bp, Artificial Sequence
  Description of Artificial Sequence: Synthetic oligonucleotide
tttcaatccattgttccaaggt

SEQ ID NO: 5287 - DNA, 22 bp, Artificial Sequence
  Description of Artificial Sequence: Synthetic oligonucleotide
taagagttcctgatggcctgct

SEQ ID NO: 5288 - DNA, 22 bp, Artificial Sequence
  Description of Artificial Sequence: Synthetic oligonucleotide
aagagactgcactgaatgtcgt

SEQ ID NO: 5289 - DNA, 22 bp, Artificial Sequence
  Description of Artificial Sequence: Synthetic oligonucleotide
aactcgttgcaggtgacgtcgt

SEQ ID NO: 5290 - DNA, 22 bp, Artificial Sequence
  Description of Artificial Sequence: Synthetic oligonucleotide
ttaatttcagtccataactcgt

SEQ ID NO: 5291 - DNA, 22 bp, Artificial Sequence
  Description of Artificial Sequence: Synthetic oligonucleotide
tttgagctcaacagcaacaggt

SEQ ID NO: 5292 - DNA, 22 bp, Artificial Sequence
  Description of Artificial Sequence: Synthetic oligonucleotide
attcttgaggaggaagtagcgt

SEQ ID NO: 5293 - DNA, 22 bp, Artificial Sequence
  Description of Artificial Sequence: Synthetic oligonucleotide
attggtcagaagaggctgcggc

SEQ ID NO: 5294 - DNA, 22 bp, Artificial Sequence
  Description of Artificial Sequence: Synthetic oligonucleotide
tatactctgcctccagggacgt

SEQ ID NO: 5295 - DNA, 22 bp, Artificial Sequence
  Description of Artificial Sequence: Synthetic oligonucleotide
atttaacaactgttctcctggc

SEQ ID NO: 5296 - DNA, 22 bp, Artificial Sequence
  Description of Artificial Sequence: Synthetic oligonucleotide
ttcagccacacagtgctttgct

SEQ ID NO: 5297 - DNA, 22 bp, Artificial Sequence
  Description of Artificial Sequence: Synthetic oligonucleotide
tactccttgcagttcatctgct

SEQ ID NO: 5298 - DNA, 22 bp, Artificial Sequence
  Description of Artificial Sequence: Synthetic oligonucleotide
atgtagtcgatgacgtgctgca

SEQ ID NO: 5299 - DNA, 22 bp, Artificial Sequence
  Description of Artificial Sequence: Synthetic oligonucleotide
atagtctgagacatgaggtggc

SEQ ID NO: 5300 - DNA, 22 bp, Artificial Sequence
  Description of Artificial Sequence: Synthetic oligonucleotide
tttcatatccagactcagtcct

SEQ ID NO: 5301 - DNA, 22 bp, Artificial Sequence
  Description of Artificial Sequence: Synthetic oligonucleotide
tttgtgaaacttgtttcctgca

SEQ ID NO: 5302 - DNA, 22 bp, Artificial Sequence
  Description of Artificial Sequence: Synthetic oligonucleotide
tatttgtaaatgtgattctggg

SEQ ID NO: 5303 - DNA, 22 bp, Artificial Sequence
  Description of Artificial Sequence: Synthetic oligonucleotide
tatctgcacgctctatactgca

SEQ ID NO: 5304 - DNA, 22 bp, Artificial Sequence
  Description of Artificial Sequence: Synthetic oligonucleotide
tatccctagaatcttggctgct

SEQ ID NO: 5305 - DNA, 22 bp, Artificial Sequence
  Description of Artificial Sequence: Synthetic oligonucleotide
attgccaaggtcatcatatgct

SEQ ID NO: 5306 - DNA, 22 bp, Artificial Sequence
  Description of Artificial Sequence: Synthetic oligonucleotide
tttaaagatggcagccattgct

SEQ ID NO: 5307 - DNA, 22 bp, Artificial Sequence
  Description of Artificial Sequence: Synthetic oligonucleotide
ttcattaatcatgtcttgccca

SEQ ID NO: 5308 - DNA, 22 bp, Artificial Sequence
  Description of Artificial Sequence: Synthetic oligonucleotide
ttctcgatagtgtcactgggct

SEQ ID NO: 5309 - DNA, 22 bp, Artificial Sequence
  Description of Artificial Sequence: Synthetic oligonucleotide
tatccgaagtggtcagagggct

SEQ ID NO: 5310 - DNA, 22 bp, Artificial Sequence
  Description of Artificial Sequence: Synthetic oligonucleotide
atctggtagcaaagagattgag

SEQ ID NO: 5311 - DNA, 22 bp, Artificial Sequence
  Description of Artificial Sequence: Synthetic oligonucleotide
aagatctttcagcttgtcggct

SEQ ID NO: 5312 - DNA, 22 bp, Artificial Sequence
  Description of Artificial Sequence: Synthetic oligonucleotide
ttctctgatcaactcaagattg

SEQ ID NO: 5313 - DNA, 22 bp, Artificial Sequence
  Description of Artificial Sequence: Synthetic oligonucleotide
atgacaattgctgatataggca

SEQ ID NO: 5314 - DNA, 22 bp, Artificial Sequence
  Description of Artificial Sequence: Synthetic oligonucleotide
attagtagtgatattaacagta

SEQ ID NO: 5315 - DNA, 22 bp, Artificial Sequence
  Description of Artificial Sequence: Synthetic oligonucleotide
gaagctgaccaggtgaatacct

SEQ ID NO: 5316 - DNA, 22 bp, Artificial Sequence
  Description of Artificial Sequence: Synthetic oligonucleotide
attataatagcttacacaggct

SEQ ID NO: 5317 - DNA, 22 bp, Artificial Sequence
  Description of Artificial Sequence: Synthetic oligonucleotide
ttctgtttcaacattgagagct

SEQ ID NO: 5318 - DNA, 22 bp, Artificial Sequence
  Description of Artificial Sequence: Synthetic oligonucleotide
tttaatcttgatgatgcaagga

SEQ ID NO: 5319 - DNA, 22 bp, Artificial Sequence
  Description of Artificial Sequence: Synthetic oligonucleotide
tatagactgtgctgactgagca

SEQ ID NO: 5320 - DNA, 22 bp, Artificial Sequence
  Description of Artificial Sequence: Synthetic oligonucleotide
tttgctgatgatctttatggct

SEQ ID NO: 5321 - DNA, 22 bp, Artificial Sequence
  Description of Artificial Sequence: Synthetic oligonucleotide
atatctctgagacagctaagct

SEQ ID NO: 5322 - DNA, 22 bp, Artificial Sequence
  Description of Artificial Sequence: Synthetic oligonucleotide
tacactcaatatgttgtttcca

SEQ ID NO: 5323 - DNA, 22 bp, Artificial Sequence
  Description of Artificial Sequence: Synthetic oligonucleotide
ataatctctgagtaatcttcct

SEQ ID NO: 5324 - DNA, 22 bp, Artificial Sequence
  Description of Artificial Sequence: Synthetic oligonucleotide
gttaaacataagtttctgagcc

SEQ ID NO: 5325 - DNA, 22 bp, Artificial Sequence
  Description of Artificial Sequence: Synthetic oligonucleotide
tataattagctcatacaccctg

SEQ ID NO: 5326 - DNA, 22 bp, Artificial Sequence
  Description of Artificial Sequence: Synthetic oligonucleotide
atatagatggagtcaaatgcct

SEQ ID NO: 5327 - DNA, 22 bp, Artificial Sequence
  Description of Artificial Sequence: Synthetic oligonucleotide
ttaaagtctcaagttacccggt

SEQ ID NO: 5328 - DNA, 22 bp, Artificial Sequence
  Description of Artificial Sequence: Synthetic oligonucleotide
aattcaaagtcatgtctgtcct

SEQ ID NO: 5329 - DNA, 22 bp, Artificial Sequence
  Description of Artificial Sequence: Synthetic oligonucleotide
ttcttggaataaattcgctccc

SEQ ID NO: 5330 - DNA, 22 bp, Artificial Sequence
  Description of Artificial Sequence: Synthetic oligonucleotide
tagtttcctgagtcactgtcca

SEQ ID NO: 5331 - DNA, 22 bp, Artificial Sequence
  Description of Artificial Sequence: Synthetic oligonucleotide
ttcacagccaggatggagtcct

SEQ ID NO: 5332 - DNA, 22 bp, Artificial Sequence
  Description of Artificial Sequence: Synthetic oligonucleotide
taaatcatccgttctgtctcca

SEQ ID NO: 5333 - DNA, 22 bp, Artificial Sequence
  Description of Artificial Sequence: Synthetic oligonucleotide
ttcttcatgaagagcagctcct

SEQ ID NO: 5334 - DNA, 22 bp, Artificial Sequence
  Description of Artificial Sequence: Synthetic oligonucleotide
taaggaaagcacgcttgatcct

SEQ ID NO: 5335 - DNA, 22 bp, Artificial Sequence
  Description of Artificial Sequence: Synthetic oligonucleotide
ttgaggaaccactggtgtgcct

SEQ ID NO: 5336 - DNA, 22 bp, Artificial Sequence
  Description of Artificial Sequence: Synthetic oligonucleotide
atacccaagcaggttagtgcca

SEQ ID NO: 5337 - DNA, 22 bp, Artificial Sequence
  Description of Artificial Sequence: Synthetic oligonucleotide
attaaagcaaagggcaatgcca

SEQ ID NO: 5338 - DNA, 22 bp, Artificial Sequence
  Description of Artificial Sequence: Synthetic oligonucleotide
ttgacgaaggactggaagtccc

SEQ ID NO: 5339 - DNA, 22 bp, Artificial Sequence
  Description of Artificial Sequence: Synthetic oligonucleotide
gttcttgtagggaaactgtcct

SEQ ID NO: 5340 - DNA, 22 bp, Artificial Sequence
  Description of Artificial Sequence: Synthetic oligonucleotide
ttgtgagtggagacagtggcca

SEQ ID NO: 5341 - DNA, 22 bp, Artificial Sequence
  Description of Artificial Sequence: Synthetic oligonucleotide
atactggtagatcctctggcca

SEQ ID NO: 5342 - DNA, 22 bp, Artificial Sequence
  Description of Artificial Sequence: Synthetic oligonucleotide
atattctccaggaggctggcca

SEQ ID NO: 5343 - DNA, 22 bp, Artificial Sequence
  Description of Artificial Sequence: Synthetic oligonucleotide
ttagtaaggcagtctttgacga

SEQ ID NO: 5344 - DNA, 22 bp, Artificial Sequence
  Description of Artificial Sequence: Synthetic oligonucleotide
taatgtctagaaagcatggcct

SEQ ID NO: 5345 - DNA, 22 bp, Artificial Sequence
  Description of Artificial Sequence: Synthetic oligonucleotide
attcctattaatataccgattc

SEQ ID NO: 5346 - DNA, 22 bp, Artificial Sequence
  Description of Artificial Sequence: Synthetic oligonucleotide
tttcttcacaagaagaactggg

SEQ ID NO: 5347 - DNA, 22 bp, Artificial Sequence
  Description of Artificial Sequence: Synthetic oligonucleotide
aatcatcatcatgttgaaccct

SEQ ID NO: 5348 - DNA, 22 bp, Artificial Sequence
  Description of Artificial Sequence: Synthetic oligonucleotide
tttattaaagtccaagttacca

SEQ ID NO: 5349 - DNA, 22 bp, Artificial Sequence
  Description of Artificial Sequence: Synthetic oligonucleotide
ataaaccataaattatccacct

SEQ ID NO: 5350 - DNA, 22 bp, Artificial Sequence
  Description of Artificial Sequence: Synthetic oligonucleotide
aattccgaggactatccaaggg

SEQ ID NO: 5351 - DNA, 22 bp, Artificial Sequence
  Description of Artificial Sequence: Synthetic oligonucleotide
caagacgtagaggtatttacgg

SEQ ID NO: 5352 - DNA, 22 bp, Artificial Sequence
  Description of Artificial Sequence: Synthetic oligonucleotide
atatgtctccatttcattggcc

SEQ ID NO: 5353 - DNA, 22 bp, Artificial Sequence
  Description of Artificial Sequence: Synthetic oligonucleotide
tttatgttcgggagatacacct

SEQ ID NO: 5354 - DNA, 22 bp, Artificial Sequence
  Description of Artificial Sequence: Synthetic oligonucleotide
ttaagctttcctctactaggca

SEQ ID NO: 5355 - DNA, 22 bp, Artificial Sequence
  Description of Artificial Sequence: Synthetic oligonucleotide
aatacagttcatgttgcatggg

SEQ ID NO: 5356 - DNA, 22 bp, Artificial Sequence
  Description of Artificial Sequence: Synthetic oligonucleotide
ttatcattgcgtggcacttgcc

SEQ ID NO: 5357 - DNA, 22 bp, Artificial Sequence
  Description of Artificial Sequence: Synthetic oligonucleotide
ttgatttcgtagaactgagcct

SEQ ID NO: 5358 - DNA, 22 bp, Artificial Sequence
  Description of Artificial Sequence: Synthetic oligonucleotide
atttcatctaggctataatcct

SEQ ID NO: 5359 - DNA, 22 bp, Artificial Sequence
  Description of Artificial Sequence: Synthetic oligonucleotide
ttattaatagaaactaggccct

SEQ ID NO: 5360 - DNA, 22 bp, Artificial Sequence
  Description of Artificial Sequence: Synthetic oligonucleotide
taacatcttgaacaagtcagcc

SEQ ID NO: 5361 - DNA, 22 bp, Artificial Sequence
  Description of Artificial Sequence: Synthetic oligonucleotide
tatttggaaatgatgacttcct

SEQ ID NO: 5362 - DNA, 22 bp, Artificial Sequence
  Description of Artificial Sequence: Synthetic oligonucleotide
tattaaatgtagatgcacccgc

SEQ ID NO: 5363 - DNA, 22 bp, Artificial Sequence
  Description of Artificial Sequence: Synthetic oligonucleotide
atgaaataggaagcagggagct

SEQ ID NO: 5364 - DNA, 22 bp, Artificial Sequence
  Description of Artificial Sequence: Synthetic oligonucleotide
atttcattagctggaagcagga

SEQ ID NO: 5365 - DNA, 22 bp, Artificial Sequence
  Description of Artificial Sequence: Synthetic oligonucleotide
tttctcatacatcataagagga

SEQ ID NO: 5366 - DNA, 22 bp, Artificial Sequence
  Description of Artificial Sequence: Synthetic oligonucleotide
aattatccattaacctgctccc

SEQ ID NO: 5367 - DNA, 22 bp, Artificial Sequence
  Description of Artificial Sequence: Synthetic oligonucleotide
ttcttcatggtgaaatgcgggc

SEQ ID NO: 5368 - DNA, 22 bp, Artificial Sequence
  Description of Artificial Sequence: Synthetic oligonucleotide
aacagagatacattccattcca

SEQ ID NO: 5369 - DNA, 22 bp, Artificial Sequence
  Description of Artificial Sequence: Synthetic oligonucleotide
attcctcgatagtttgacaggg

SEQ ID NO: 5370 - DNA, 22 bp, Artificial Sequence
  Description of Artificial Sequence: Synthetic oligonucleotide
taagtatattgctcagttgccc

SEQ ID NO: 5371 - DNA, 22 bp, Artificial Sequence
  Description of Artificial Sequence: Synthetic oligonucleotide
taggtagctgatgatatctgcc

SEQ ID NO: 5372 - DNA, 22 bp, Artificial Sequence
  Description of Artificial Sequence: Synthetic oligonucleotide
attatcaataactgcgactcca

SEQ ID NO: 5373 - DNA, 22 bp, Artificial Sequence
  Description of Artificial Sequence: Synthetic oligonucleotide
atagaaagggagtagcaaccgc

SEQ ID NO: 5374 - DNA, 22 bp, Artificial Sequence
  Description of Artificial Sequence: Synthetic oligonucleotide
ttgtctttatgcattcaaagca

SEQ ID NO: 5375 - DNA, 22 bp, Artificial Sequence
  Description of Artificial Sequence: Synthetic oligonucleotide
taagagaagcacagttcagcca

SEQ ID NO: 5376 - DNA, 22 bp, Artificial Sequence
  Description of Artificial Sequence: Synthetic oligonucleotide
tttagatacgaaatctccagaa

SEQ ID NO: 5377 - DNA, 22 bp, Artificial Sequence
  Description of Artificial Sequence: Synthetic oligonucleotide
tatctaggagagaaagaaaccc

SEQ ID NO: 5378 - DNA, 22 bp, Artificial Sequence
  Description of Artificial Sequence: Synthetic oligonucleotide
ttagattatagagtcctaagta

SEQ ID NO: 5379 - DNA, 22 bp, Artificial Sequence
  Description of Artificial Sequence: Synthetic oligonucleotide
atactctagccacagcatagca

SEQ ID NO: 5380 - DNA, 22 bp, Artificial Sequence
  Description of Artificial Sequence: Synthetic oligonucleotide
taaacataacatagagattgga

SEQ ID NO: 5381 - DNA, 22 bp, Artificial Sequence
  Description of Artificial Sequence: Synthetic oligonucleotide
ataaattaaacgctcaggctct

SEQ ID NO: 5382 - DNA, 22 bp, Artificial Sequence
  Description of Artificial Sequence: Synthetic oligonucleotide
ttaattgcagactccatttcgg

SEQ ID NO: 5383 - DNA, 22 bp, Artificial Sequence
  Description of Artificial Sequence: Synthetic oligonucleotide
atatgctaacatgtactatcac

SEQ ID NO: 5384 - DNA, 22 bp, Artificial Sequence
  Description of Artificial Sequence: Synthetic oligonucleotide
catgatattcagataccagcca

SEQ ID NO: 5385 - DNA, 22 bp, Artificial Sequence
  Description of Artificial Sequence: Synthetic oligonucleotide
ttaagatgagcttcttcaagga

SEQ ID NO: 5386 - DNA, 22 bp, Artificial Sequence
  Description of Artificial Sequence: Synthetic oligonucleotide
attgttcatgaagtactcagca

SEQ ID NO: 5387 - DNA, 22 bp, Artificial Sequence
  Description of Artificial Sequence: Synthetic oligonucleotide
atacatttctctacagtcaccc

SEQ ID NO: 5388 - DNA, 22 bp, Artificial Sequence
  Description of Artificial Sequence: Synthetic oligonucleotide
atacaaagactgaacattgccc

SEQ ID NO: 5389 - DNA, 22 bp, Artificial Sequence
  Description of Artificial Sequence: Synthetic oligonucleotide
tttatgcattcacttgtttggt

SEQ ID NO: 5390 - DNA, 22 bp, Artificial Sequence
  Description of Artificial Sequence: Synthetic oligonucleotide
atcatacagaggatgttatcct

SEQ ID NO: 5391 - DNA, 22 bp, Artificial Sequence
  Description of Artificial Sequence: Synthetic oligonucleotide
atatcaatcaattgtttcacct

SEQ ID NO: 5392 - DNA, 22 bp, Artificial Sequence
  Description of Artificial Sequence: Synthetic oligonucleotide
aatatactccacaatcactgct

SEQ ID NO: 5393 - DNA, 22 bp, Artificial Sequence
  Description of Artificial Sequence: Synthetic oligonucleotide
atttgtaattcagagatgcgct

SEQ ID NO: 5394 - DNA, 22 bp, Artificial Sequence
  Description of Artificial Sequence: Synthetic oligonucleotide
tttcttgaatactgaggcagcg

SEQ ID NO: 5395 - DNA, 22 bp, Artificial Sequence
  Description of Artificial Sequence: Synthetic oligonucleotide
taatattgggtaaatgggtcct

SEQ ID NO: 5396 - DNA, 22 bp, Artificial Sequence
  Description of Artificial Sequence: Synthetic oligonucleotide
atatatttctttatcacgacgc

SEQ ID NO: 5397 - DNA, 22 bp, Artificial Sequence
  Description of Artificial Sequence: Synthetic oligonucleotide
taaactctaactgttctgaggt

SEQ ID NO: 5398 - DNA, 22 bp, Artificial Sequence
  Description of Artificial Sequence: Synthetic oligonucleotide
ttacaatctagcagtatctggc

SEQ ID NO: 5399 - DNA, 22 bp, Artificial Sequence
  Description of Artificial Sequence: Synthetic oligonucleotide
ttctcattcttgatcctttgca

SEQ ID NO: 5400 - DNA, 22 bp, Artificial Sequence
  Description of Artificial Sequence: Synthetic oligonucleotide
ttaggaactgggatagaaacct

SEQ ID NO: 5401 - DNA, 22 bp, Artificial Sequence
  Description of Artificial Sequence: Synthetic oligonucleotide
tttacaaactatgttgggccct

SEQ ID NO: 5402 - DNA, 22 bp, Artificial Sequence
  Description of Artificial Sequence: Synthetic oligonucleotide
attaactgtgaatctgattcga

SEQ ID NO: 5403 - DNA, 22 bp, Artificial Sequence
  Description of Artificial Sequence: Synthetic oligonucleotide
aagatgcttcagattatgagcc

SEQ ID NO: 5404 - DNA, 22 bp, Artificial Sequence
  Description of Artificial Sequence: Synthetic oligonucleotide
ttattgtaaatagccagaccca

SEQ ID NO: 5405 - DNA, 22 bp, Artificial Sequence
  Description of Artificial Sequence: Synthetic oligonucleotide
ataggaaaccagagagggagcc

SEQ ID NO: 5406 - DNA, 22 bp, Artificial Sequence
  Description of Artificial Sequence: Synthetic oligonucleotide
tttacgaagagtttgctctgcg

SEQ ID NO: 5407 - DNA, 22 bp, Artificial Sequence
  Description of Artificial Sequence: Synthetic oligonucleotide
aatacctcctttcttatctcgg

SEQ ID NO: 5408 - DNA, 22 bp, Artificial Sequence
  Description of Artificial Sequence: Synthetic oligonucleotide
attcataacagtctctgctcct

SEQ ID NO: 5409 - DNA, 22 bp, Artificial Sequence
  Description of Artificial Sequence: Synthetic oligonucleotide
ttccttcaactctagctcagca

SEQ ID NO: 5410 - DNA, 22 bp, Artificial Sequence
  Description of Artificial Sequence: Synthetic oligonucleotide
taagagtctcataatttctgca

SEQ ID NO: 5411 - DNA, 22 bp, Artificial Sequence
  Description of Artificial Sequence: Synthetic oligonucleotide
atagttcactattggactggcc

SEQ ID NO: 5412 - DNA, 22 bp, Artificial Sequence
  Description of Artificial Sequence: Synthetic oligonucleotide
ttatctcttcttcaaataagct

SEQ ID NO: 5413 - DNA, 22 bp, Artificial Sequence
  Description of Artificial Sequence: Synthetic oligonucleotide
ttcatcagagatcacaatagct

SEQ ID NO: 5414 - DNA, 22 bp, Artificial Sequence
  Description of Artificial Sequence: Synthetic oligonucleotide
atgaatgtaggtatagaaacgt

SEQ ID NO: 5415 - DNA, 22 bp, Artificial Sequence
  Description of Artificial Sequence: Synthetic oligonucleotide
ttatatagacccgaaagctggt

SEQ ID NO: 5416 - DNA, 22 bp, Artificial Sequence
  Description of Artificial Sequence: Synthetic oligonucleotide
ttctttaacagaccgcacagct

SEQ ID NO: 5417 - DNA, 22 bp, Artificial Sequence
  Description of Artificial Sequence: Synthetic oligonucleotide
aattcaatacagagaaaggcct

SEQ ID NO: 5418 - DNA, 22 bp, Artificial Sequence
  Description of Artificial Sequence: Synthetic oligonucleotide
tttctcatccagcattcggccc

SEQ ID NO: 5419 - DNA, 22 bp, Artificial Sequence
  Description of Artificial Sequence: Synthetic oligonucleotide
atatgttcatataagccatcca

SEQ ID NO: 5420 - DNA, 22 bp, Artificial Sequence
  Description of Artificial Sequence: Synthetic oligonucleotide
attccatcatctgtgatcagct

SEQ ID NO: 5421 - DNA, 22 bp, Artificial Sequence
  Description of Artificial Sequence: Synthetic oligonucleotide
atacggattaggcaacaacggc

SEQ ID NO: 5422 - DNA, 22 bp, Artificial Sequence
  Description of Artificial Sequence: Synthetic oligonucleotide
atccatgataagcttggtgcgc

SEQ ID NO: 5423 - DNA, 22 bp, Artificial Sequence
  Description of Artificial Sequence: Synthetic oligonucleotide
tactttcccttaaatattgccc

SEQ ID NO: 5424 - DNA, 22 bp, Artificial Sequence
  Description of Artificial Sequence: Synthetic oligonucleotide
attactttccagaatggaagca

SEQ ID NO: 5425 - DNA, 22 bp, Artificial Sequence
  Description of Artificial Sequence: Synthetic oligonucleotide
attagggactatttaaagtccc

SEQ ID NO: 5426 - DNA, 22 bp, Artificial Sequence
  Description of Artificial Sequence: Synthetic oligonucleotide
tttccttccatcctattatggc

SEQ ID NO: 5427 - DNA, 22 bp, Artificial Sequence
  Description of Artificial Sequence: Synthetic oligonucleotide
tatatcaatatcagtaaaccct

SEQ ID NO: 5428 - DNA, 22 bp, Artificial Sequence
  Description of Artificial Sequence: Synthetic oligonucleotide
taagctagagaacatctctgcc

SEQ ID NO: 5429 - DNA, 22 bp, Artificial Sequence
  Description of Artificial Sequence: Synthetic oligonucleotide
tatagaaatctcagcagcgcca

SEQ ID NO: 5430 - DNA, 22 bp, Artificial Sequence
  Description of Artificial Sequence: Synthetic oligonucleotide
ataagaatccattgtatgtggc

SEQ ID NO: 5431 - DNA, 22 bp, Artificial Sequence
  Description of Artificial Sequence: Synthetic oligonucleotide
aatataactgccattacatggt

SEQ ID NO: 5432 - DNA, 22 bp, Artificial Sequence
  Description of Artificial Sequence: Synthetic oligonucleotide
tttcttcctccggtgctggcgg

SEQ ID NO: 5433 - DNA, 22 bp, Artificial Sequence
  Description of Artificial Sequence: Synthetic oligonucleotide
ttcccttattaaaccattgctg

SEQ ID NO: 5434 - DNA, 22 bp, Artificial Sequence
  Description of Artificial Sequence: Synthetic oligonucleotide
agtaaataacaatttccttcca

SEQ ID NO: 5435 - DNA, 22 bp, Artificial Sequence
  Description of Artificial Sequence: Synthetic oligonucleotide
ttaccttctcagaagagaggct

SEQ ID NO: 5436 - DNA, 22 bp, Artificial Sequence
  Description of Artificial Sequence: Synthetic oligonucleotide
ttaatacatctgagggtgtgga

SEQ ID NO: 5437 - DNA, 22 bp, Artificial Sequence
  Description of Artificial Sequence: Synthetic oligonucleotide
ttaaattctgaaaccagctgca

SEQ ID NO: 5438 - DNA, 22 bp, Artificial Sequence
  Description of Artificial Sequence: Synthetic oligonucleotide
atgtctggagggcttcagtggc

SEQ ID NO: 5439 - DNA, 22 bp, Artificial Sequence
  Description of Artificial Sequence: Synthetic oligonucleotide
aacagactccagaaattgagca

SEQ ID NO: 5440 - DNA, 22 bp, Artificial Sequence
  Description of Artificial Sequence: Synthetic oligonucleotide
aatcaggaacaaccttgcagcc

SEQ ID NO: 5441 - DNA, 22 bp, Artificial Sequence
  Description of Artificial Sequence: Synthetic oligonucleotide
tttaaagtagccgctactagcg

SEQ ID NO: 5442 - DNA, 22 bp, Artificial Sequence
  Description of Artificial Sequence: Synthetic oligonucleotide
ttggtgtaagttacaagtaggt

SEQ ID NO: 5443 - DNA, 22 bp, Artificial Sequence
  Description of Artificial Sequence: Synthetic oligonucleotide
aatactatttacaaagaaccct

SEQ ID NO: 5444 - DNA, 22 bp, Artificial Sequence
  Description of Artificial Sequence: Synthetic oligonucleotide
aattgaaatgacatttcctggc

SEQ ID NO: 5445 - DNA, 22 bp, Artificial Sequence
  Description of Artificial Sequence: Synthetic oligonucleotide
ttctgtttgaagctgttctcga

SEQ ID NO: 5446 - DNA, 22 bp, Artificial Sequence
  Description of Artificial Sequence: Synthetic oligonucleotide
tttgaataaattcttctctgga

SEQ ID NO: 5447 - DNA, 22 bp, Artificial Sequence
  Description of Artificial Sequence: Synthetic oligonucleotide
cttcactaagcatatacaacgt

SEQ ID NO: 5448 - DNA, 22 bp, Artificial Sequence
  Description of Artificial Sequence: Synthetic oligonucleotide
ttgcagtgaggcatgcttggca

SEQ ID NO: 5449 - DNA, 22 bp, Artificial Sequence
  Description of Artificial Sequence: Synthetic oligonucleotide
atagacaactgtctacattccc

SEQ ID NO: 5450 - DNA, 22 bp, Artificial Sequence
  Description of Artificial Sequence: Synthetic oligonucleotide
ttgatgttccagatcaggtcgt

SEQ ID NO: 5451 - DNA, 22 bp, Artificial Sequence
  Description of Artificial Sequence: Synthetic oligonucleotide
ttacattaatgcgtcatcagct

SEQ ID NO: 5452 - DNA, 22 bp, Artificial Sequence
  Description of Artificial Sequence: Synthetic oligonucleotide
tttccttaagtacttcctgggc

SEQ ID NO: 5453 - DNA, 22 bp, Artificial Sequence
  Description of Artificial Sequence: Synthetic oligonucleotide
taacataaaggcattatctgcc

SEQ ID NO: 5454 - DNA, 22 bp, Artificial Sequence
  Description of Artificial Sequence: Synthetic oligonucleotide
atcgccagtaagcaataatgca

SEQ ID NO: 5455 - DNA, 22 bp, Artificial Sequence
  Description of Artificial Sequence: Synthetic oligonucleotide
ttctggtgtgggatatatggcc

SEQ ID NO: 5456 - DNA, 22 bp, Artificial Sequence
  Description of Artificial Sequence: Synthetic oligonucleotide
atagtgagacatctgattgccg

SEQ ID NO: 5457 - DNA, 22 bp, Artificial Sequence
  Description of Artificial Sequence: Synthetic oligonucleotide
tataggttgcagcttggctcta

SEQ ID NO: 5458 - DNA, 22 bp, Artificial Sequence
  Description of Artificial Sequence: Synthetic oligonucleotide
attctcgttcagttatctgccc

SEQ ID NO: 5459 - DNA, 22 bp, Artificial Sequence
  Description of Artificial Sequence: Synthetic oligonucleotide
ttaattacttggccaaacacca

SEQ ID NO: 5460 - DNA, 22 bp, Artificial Sequence
  Description of Artificial Sequence: Synthetic oligonucleotide
taaaccttataggtggaaaggt

SEQ ID NO: 5461 - DNA, 22 bp, Artificial Sequence
  Description of Artificial Sequence: Synthetic oligonucleotide
caattctaagacaattcgacca

SEQ ID NO: 5462 - DNA, 22 bp, Artificial Sequence
  Description of Artificial Sequence: Synthetic oligonucleotide
tttaacagtgaacatttcacct

SEQ ID NO: 5463 - DNA, 22 bp, Artificial Sequence
  Description of Artificial Sequence: Synthetic oligonucleotide
tttctctatagttgtagctcct

SEQ ID NO: 5464 - DNA, 22 bp, Artificial Sequence
  Description of Artificial Sequence: Synthetic oligonucleotide
tactgtagacagatatcaccca

SEQ ID NO: 5465 - DNA, 22 bp, Artificial Sequence
  Description of Artificial Sequence: Synthetic oligonucleotide
ttcctgtctgaggcatagaggc

SEQ ID NO: 5466 - DNA, 22 bp, Artificial Sequence
  Description of Artificial Sequence: Synthetic oligonucleotide
taagtaaatcatcagcaaacga

SEQ ID NO: 5467 - DNA, 22 bp, Artificial Sequence
  Description of Artificial Sequence: Synthetic oligonucleotide
ttattgcttgtaagaagtacgt

SEQ ID NO: 5468 - DNA, 22 bp, Artificial Sequence
  Description of Artificial Sequence: Synthetic oligonucleotide
atctgtctacctaggcatacca

SEQ ID NO: 5469 - DNA, 22 bp, Artificial Sequence
  Description of Artificial Sequence: Synthetic oligonucleotide
atagcttcaactttcacctgga

SEQ ID NO: 5470 - DNA, 22 bp, Artificial Sequence
  Description of Artificial Sequence: Synthetic oligonucleotide
attcactaccaggtacactgcc

SEQ ID NO: 5471 - DNA, 22 bp, Artificial Sequence
  Description of Artificial Sequence: Synthetic oligonucleotide
ttactttcatcatctaatccct

SEQ ID NO: 5472 - DNA, 22 bp, Artificial Sequence
  Description of Artificial Sequence: Synthetic oligonucleotide
attctgaaacaactaatttgct

SEQ ID NO: 5473 - DNA, 22 bp, Artificial Sequence
  Description of Artificial Sequence: Synthetic oligonucleotide
tattggtgaatgatcctccggt

SEQ ID NO: 5474 - DNA, 22 bp, Artificial Sequence
  Description of Artificial Sequence: Synthetic oligonucleotide
cttacgtgtcagcatgtcatct

SEQ ID NO: 5475 - DNA, 22 bp, Artificial Sequence
  Description of Artificial Sequence: Synthetic oligonucleotide
aattcataccatttgcctgtcc

SEQ ID NO: 5476 - DNA, 22 bp, Artificial Sequence
  Description of Artificial Sequence: Synthetic oligonucleotide
tattccttgtagcttagctgct

SEQ ID NO: 5477 - DNA, 22 bp, Artificial Sequence
  Description of Artificial Sequence: Synthetic oligonucleotide
aatatcttgaagtgatccgcca

SEQ ID NO: 5478 - DNA, 22 bp, Artificial Sequence
  Description of Artificial Sequence: Synthetic oligonucleotide
ttactttaatagccacatccct

SEQ ID NO: 5479 - DNA, 22 bp, Artificial Sequence
  Description of Artificial Sequence: Synthetic oligonucleotide
tataacctccatgtattggcat

SEQ ID NO: 5480 - DNA, 22 bp, Artificial Sequence
  Description of Artificial Sequence: Synthetic oligonucleotide
ttagtaattcgttctggaagcc

SEQ ID NO: 5481 - DNA, 22 bp, Artificial Sequence
  Description of Artificial Sequence: Synthetic oligonucleotide
tttgtatagcaagtttacagga

SEQ ID NO: 5482 - DNA, 22 bp, Artificial Sequence
  Description of Artificial Sequence: Synthetic oligonucleotide
attcattgggccagaaagtgct

SEQ ID NO: 5483 - DNA, 22 bp, Artificial Sequence
  Description of Artificial Sequence: Synthetic oligonucleotide
attgtggtccacaaagtatcgc

SEQ ID NO: 5484 - DNA, 22 bp, Artificial Sequence
  Description of Artificial Sequence: Synthetic oligonucleotide
aatagatttcaaattaagtgat

SEQ ID NO: 5485 - DNA, 22 bp, Artificial Sequence
  Description of Artificial Sequence: Synthetic oligonucleotide
ttaatatacaagggctcaaccg

SEQ ID NO: 5486 - DNA, 22 bp, Artificial Sequence
  Description of Artificial Sequence: Synthetic oligonucleotide
atcttcaaactcatagagaggc

SEQ ID NO: 5487 - DNA, 22 bp, Artificial Sequence
  Description of Artificial Sequence: Synthetic oligonucleotide
ttccattactacaaagactcgt

SEQ ID NO: 5488 - DNA, 22 bp, Artificial Sequence
  Description of Artificial Sequence: Synthetic oligonucleotide
ttgaggtaataatttgaacgga

SEQ ID NO: 5489 - DNA, 22 bp, Artificial Sequence
  Description of Artificial Sequence: Synthetic oligonucleotide
ttaactgatcaaccataagcat

SEQ ID NO: 5490 - DNA, 22 bp, Artificial Sequence
  Description of Artificial Sequence: Synthetic oligonucleotide
ttatccatactctttatccctc

SEQ ID NO: 5491 - DNA, 22 bp, Artificial Sequence
  Description of Artificial Sequence: Synthetic oligonucleotide
tactgatacctggtaatctcct

SEQ ID NO: 5492 - DNA, 22 bp, Artificial Sequence
  Description of Artificial Sequence: Synthetic oligonucleotide
taatacagagatgtaatctccg

SEQ ID NO: 5493 - DNA, 22 bp, Artificial Sequence
  Description of Artificial Sequence: Synthetic oligonucleotide
aattgccatgagggagttggaa

SEQ ID NO: 5494 - DNA, 22 bp, Artificial Sequence
  Description of Artificial Sequence: Synthetic oligonucleotide
atctatattaagtttctctggt

SEQ ID NO: 5495 - DNA, 22 bp, Artificial Sequence
  Description of Artificial Sequence: Synthetic oligonucleotide
attaatctggacagtttcatct

SEQ ID NO: 5496 - DNA, 22 bp, Artificial Sequence
  Description of Artificial Sequence: Synthetic oligonucleotide
ttatcttcaagcattacctcca

SEQ ID NO: 5497 - DNA, 22 bp, Artificial Sequence
  Description of Artificial Sequence: Synthetic oligonucleotide
tttacctgtgaggtctaaggtc

SEQ ID NO: 5498 - DNA, 22 bp, Artificial Sequence
  Description of Artificial Sequence: Synthetic oligonucleotide
tatagaaaggccaagcataggc

SEQ ID NO: 5499 - DNA, 22 bp, Artificial Sequence
  Description of Artificial Sequence: Synthetic oligonucleotide
atttatctaccaaatacatgga

SEQ ID NO: 5500 - DNA, 22 bp, Artificial Sequence
  Description of Artificial Sequence: Synthetic oligonucleotide
tatttgcacacaaattctgcca

SEQ ID NO: 5501 - DNA, 22 bp, Artificial Sequence
  Description of Artificial Sequence: Synthetic oligonucleotide
tatgattcacaaagtaaaccct

SEQ ID NO: 5502 - DNA, 22 bp, Artificial Sequence
  Description of Artificial Sequence: Synthetic oligonucleotide
atgtcattgagtatagattccc

SEQ ID NO: 5503 - DNA, 22 bp, Artificial Sequence
  Description of Artificial Sequence: Synthetic oligonucleotide
tttcttcttgatcttatctcca

SEQ ID NO: 5504 - DNA, 22 bp, Artificial Sequence
  Description of Artificial Sequence: Synthetic oligonucleotide
taatcatagttcttataagcgg

SEQ ID NO: 5505 - DNA, 22 bp, Artificial Sequence
  Description of Artificial Sequence: Synthetic oligonucleotide
ttatgaaagcaactgttgtcta

SEQ ID NO: 5506 - DNA, 22 bp, Artificial Sequence
  Description of Artificial Sequence: Synthetic oligonucleotide
atatgttgagaggcagattctg

SEQ ID NO: 5507 - DNA, 22 bp, Artificial Sequence
  Description of Artificial Sequence: Synthetic oligonucleotide
ttaaattaatctggttggtcca

SEQ ID NO: 5508 - DNA, 22 bp, Artificial Sequence
  Description of Artificial Sequence: Synthetic oligonucleotide
ttgtaattaggtaacagcaggg

SEQ ID NO: 5509 - DNA, 22 bp, Artificial Sequence
  Description of Artificial Sequence: Synthetic oligonucleotide
aattatcttcttaatcgcagag

SEQ ID NO: 5510 - DNA, 22 bp, Artificial Sequence
  Description of Artificial Sequence: Synthetic oligonucleotide
tgtaattaggagtcccacacag

SEQ ID NO: 5511 - DNA, 22 bp, Artificial Sequence
  Description of Artificial Sequence: Synthetic oligonucleotide
tttccatatgtgatgataggcc

SEQ ID NO: 5512 - DNA, 22 bp, Artificial Sequence
  Description of Artificial Sequence: Synthetic oligonucleotide
tattctgtacaattcatatggt

SEQ ID NO: 5513 - DNA, 22 bp, Artificial Sequence
  Description of Artificial Sequence: Synthetic oligonucleotide
tatagccagaagtaaagaactc

SEQ ID NO: 5514 - DNA, 22 bp, Artificial Sequence
  Description of Artificial Sequence: Synthetic oligonucleotide
ttatgaataaccttcatgacac

SEQ ID NO: 5515 - DNA, 22 bp, Artificial Sequence
  Description of Artificial Sequence: Synthetic oligonucleotide
atttcacaagagttgccaagcc

SEQ ID NO: 5516 - DNA, 22 bp, Artificial Sequence
  Description of Artificial Sequence: Synthetic oligonucleotide
tactggtagcatttatcctgct

SEQ ID NO: 5517 - DNA, 22 bp, Artificial Sequence
  Description of Artificial Sequence: Synthetic oligonucleotide
atcaatgagctggacaatggtc

SEQ ID NO: 5518 - DNA, 22 bp, Artificial Sequence
  Description of Artificial Sequence: Synthetic oligonucleotide
taaatacatagaagcaggccct

SEQ ID NO: 5519 - DNA, 22 bp, Artificial Sequence
  Description of Artificial Sequence: Synthetic oligonucleotide
ttagtaggtcggtatctgcgag

SEQ ID NO: 5520 - DNA, 22 bp, Artificial Sequence
  Description of Artificial Sequence: Synthetic oligonucleotide
tttctggtaaattgtcaaagct

SEQ ID NO: 5521 - DNA, 22 bp, Artificial Sequence
  Description of Artificial Sequence: Synthetic oligonucleotide
atttcccttgctgatatgaggg

SEQ ID NO: 5522 - DNA, 22 bp, Artificial Sequence
  Description of Artificial Sequence: Synthetic oligonucleotide
atatttggacatgttctgggcc

SEQ ID NO: 5523 - DNA, 22 bp, Artificial Sequence
  Description of Artificial Sequence: Synthetic oligonucleotide
tttcattaggtttcaaagccca

SEQ ID NO: 5524 - DNA, 22 bp, Artificial Sequence
  Description of Artificial Sequence: Synthetic oligonucleotide
gaatataaagacaaccctggct

SEQ ID NO: 5525 - DNA, 22 bp, Artificial Sequence
  Description of Artificial Sequence: Synthetic oligonucleotide
tatctcaatcgttatttctcca

SEQ ID NO: 5526 - DNA, 22 bp, Artificial Sequence
  Description of Artificial Sequence: Synthetic oligonucleotide
attaatattgcttgagctggct

SEQ ID NO: 5527 - DNA, 22 bp, Artificial Sequence
  Description of Artificial Sequence: Synthetic oligonucleotide
ttaaagtacttgatcatctgcg

SEQ ID NO: 5528 - DNA, 22 bp, Artificial Sequence
  Description of Artificial Sequence: Synthetic oligonucleotide
tttataacaaatgcgacgagct

SEQ ID NO: 5529 - DNA, 22 bp, Artificial Sequence
  Description of Artificial Sequence: Synthetic oligonucleotide
ctttattgagactccagtggcc

SEQ ID NO: 5530 - DNA, 22 bp, Artificial Sequence
  Description of Artificial Sequence: Synthetic oligonucleotide
taaggttaacaaaggctgacat

SEQ ID NO: 5531 - DNA, 22 bp, Artificial Sequence
  Description of Artificial Sequence: Synthetic oligonucleotide
aatcattgggaactcatcacga

SEQ ID NO: 5532 - DNA, 22 bp, Artificial Sequence
  Description of Artificial Sequence: Synthetic oligonucleotide
atatgcctttgtataatgccca

SEQ ID NO: 5533 - DNA, 22 bp, Artificial Sequence
  Description of Artificial Sequence: Synthetic oligonucleotide
gtttcctttaaatttgtctgga

SEQ ID NO: 5534 - DNA, 22 bp, Artificial Sequence
  Description of Artificial Sequence: Synthetic oligonucleotide
taaatttgtctggaaatgacca

SEQ ID NO: 5535 - DNA, 22 bp, Artificial Sequence
  Description of Artificial Sequence: Synthetic oligonucleotide
tttaccactggtgtagacagct

SEQ ID NO: 5536 - DNA, 22 bp, Artificial Sequence
  Description of Artificial Sequence: Synthetic oligonucleotide
tattatggccacacttcgactg

SEQ ID NO: 5537 - DNA, 22 bp, Artificial Sequence
  Description of Artificial Sequence: Synthetic oligonucleotide
tatcaaaggcatacaacatgag

SEQ ID NO: 5538 - DNA, 22 bp, Artificial Sequence
  Description of Artificial Sequence: Synthetic oligonucleotide
aactcttctcacatcatcagat

SEQ ID NO: 5539 - DNA, 22 bp, Artificial Sequence
  Description of Artificial Sequence: Synthetic oligonucleotide
tattgctccacaatgaagtcct

SEQ ID NO: 5540 - DNA, 22 bp, Artificial Sequence
  Description of Artificial Sequence: Synthetic oligonucleotide
ttctcatcaaagaactccactc

SEQ ID NO: 5541 - DNA, 22 bp, Artificial Sequence
  Description of Artificial Sequence: Synthetic oligonucleotide
taatcgaatcaaattagaatat

SEQ ID NO: 5542 - DNA, 22 bp, Artificial Sequence
  Description of Artificial Sequence: Synthetic oligonucleotide
atatttcatagcacagcaacgc

SEQ ID NO: 5543 - DNA, 22 bp, Artificial Sequence
  Description of Artificial Sequence: Synthetic oligonucleotide
ttaatgtagttgttggagtccc

SEQ ID NO: 5544 - DNA, 22 bp, Artificial Sequence
  Description of Artificial Sequence: Synthetic oligonucleotide
atattacatataagcgcctcct

SEQ ID NO: 5545 - DNA, 22 bp, Artificial Sequence
  Description of Artificial Sequence: Synthetic oligonucleotide
tttcaggatcgtgcactttctc

SEQ ID NO: 5546 - DNA, 22 bp, Artificial Sequence
  Description of Artificial Sequence: Synthetic oligonucleotide
taatgcatttacttattctccc

SEQ ID NO: 5547 - DNA, 22 bp, Artificial Sequence
  Description of Artificial Sequence: Synthetic oligonucleotide
atcttcacagacccagttggtc

SEQ ID NO: 5548 - DNA, 22 bp, Artificial Sequence
  Description of Artificial Sequence: Synthetic oligonucleotide
ttatagtaatagcgcagggccc

SEQ ID NO: 5549 - DNA, 22 bp, Artificial Sequence
  Description of Artificial Sequence: Synthetic oligonucleotide
ataagaggatccatcatggcct

SEQ ID NO: 5550 - DNA, 22 bp, Artificial Sequence
  Description of Artificial Sequence: Synthetic oligonucleotide
aacatatacaactttcaggcca

SEQ ID NO: 5551 - DNA, 22 bp, Artificial Sequence
  Description of Artificial Sequence: Synthetic oligonucleotide
tttagtgaagatcctcatggac

SEQ ID NO: 5552 - DNA, 22 bp, Artificial Sequence
  Description of Artificial Sequence: Synthetic oligonucleotide
ttagacattcaatgatggtcgt

SEQ ID NO: 5553 - DNA, 22 bp, Artificial Sequence
  Description of Artificial Sequence: Synthetic oligonucleotide
ttactctgaggatcaatgcgga

SEQ ID NO: 5554 - DNA, 22 bp, Artificial Sequence
  Description of Artificial Sequence: Synthetic oligonucleotide
atttctgatgactgattcaggg

SEQ ID NO: 5555 - DNA, 22 bp, Artificial Sequence
  Description of Artificial Sequence: Synthetic oligonucleotide
ttagcataagccttgacaggtc

SEQ ID NO: 5556 - DNA, 22 bp, Artificial Sequence
  Description of Artificial Sequence: Synthetic oligonucleotide
ttactgtgtaaacacatgatcc

SEQ ID NO: 5557 - DNA, 22 bp, Artificial Sequence
  Description of Artificial Sequence: Synthetic oligonucleotide
tagttagtgctgataaagacag

SEQ ID NO: 5558 - DNA, 22 bp, Artificial Sequence
  Description of Artificial Sequence: Synthetic oligonucleotide
atatacttcattaggagatcca

SEQ ID NO: 5559 - DNA, 22 bp, Artificial Sequence
  Description of Artificial Sequence: Synthetic oligonucleotide
aatcattaacagtgatctggcg

SEQ ID NO: 5560 - DNA, 22 bp, Artificial Sequence
  Description of Artificial Sequence: Synthetic oligonucleotide
atttcatagcttgtagcctggc

SEQ ID NO: 5561 - DNA, 22 bp, Artificial Sequence
  Description of Artificial Sequence: Synthetic oligonucleotide
ttatatcatagcaccgactgag

SEQ ID NO: 5562 - DNA, 22 bp, Artificial Sequence
  Description of Artificial Sequence: Synthetic oligonucleotide
gaagggaatgccatatctgggc

SEQ ID NO: 5563 - DNA, 22 bp, Artificial Sequence
  Description of Artificial Sequence: Synthetic oligonucleotide
ttattggaagatcattgctgtt

SEQ ID NO: 5564 - DNA, 22 bp, Artificial Sequence
  Description of Artificial Sequence: Synthetic oligonucleotide
ctgtgtaaacacatgatccgct

SEQ ID NO: 5565 - DNA, 22 bp, Artificial Sequence
  Description of Artificial Sequence: Synthetic oligonucleotide
atcttgatgaagttgtccaggt

SEQ ID NO: 5566 - DNA, 22 bp, Artificial Sequence
  Description of Artificial Sequence: Synthetic oligonucleotide
ttgatgattgagtgactctgca

SEQ ID NO: 5567 - DNA, 22 bp, Artificial Sequence
  Description of Artificial Sequence: Synthetic oligonucleotide
tttggacagcaccttcattgca

SEQ ID NO: 5568 - DNA, 22 bp, Artificial Sequence
  Description of Artificial Sequence: Synthetic oligonucleotide
atttgcgacaatcttgcttgtc

SEQ ID NO: 5569 - DNA, 22 bp, Artificial Sequence
  Description of Artificial Sequence: Synthetic oligonucleotide
atctcgtaacgaacaaactggt

SEQ ID NO: 5570 - DNA, 22 bp, Artificial Sequence
  Description of Artificial Sequence: Synthetic oligonucleotide
gtagctaaagggactatttgcc

SEQ ID NO: 5571 - DNA, 22 bp, Artificial Sequence
  Description of Artificial Sequence: Synthetic oligonucleotide
ttagctaaatgaagaggctcgt

SEQ ID NO: 5572 - DNA, 22 bp, Artificial Sequence
  Description of Artificial Sequence: Synthetic oligonucleotide
atactgattcagctgcacacag

SEQ ID NO: 5573 - DNA, 22 bp, Artificial Sequence
  Description of Artificial Sequence: Synthetic oligonucleotide
taaacccaccacatatgtagac

SEQ ID NO: 5574 - DNA, 22 bp, Artificial Sequence
  Description of Artificial Sequence: Synthetic oligonucleotide
atagcctttcaaataggctgcc

SEQ ID NO: 5575 - DNA, 22 bp, Artificial Sequence
  Description of Artificial Sequence: Synthetic oligonucleotide
tatactcatgccatgagcatca

SEQ ID NO: 5576 - DNA, 22 bp, Artificial Sequence
  Description of Artificial Sequence: Synthetic oligonucleotide
ttaacatatagagttcagccat

SEQ ID NO: 5577 - DNA, 22 bp, Artificial Sequence
  Description of Artificial Sequence: Synthetic oligonucleotide
tttctcctcagatgaaggtggt

SEQ ID NO: 5578 - DNA, 22 bp, Artificial Sequence
  Description of Artificial Sequence: Synthetic oligonucleotide
tttcacttacaggtaacaccaa

SEQ ID NO: 5579 - DNA, 22 bp, Artificial Sequence
  Description of Artificial Sequence: Synthetic oligonucleotide
ttaaataagccctgtccaaggg

SEQ ID NO: 5580 - DNA, 22 bp, Artificial Sequence
  Description of Artificial Sequence: Synthetic oligonucleotide
taagtccatctgtctgggtccc

SEQ ID NO: 5581 - DNA, 22 bp, Artificial Sequence
  Description of Artificial Sequence: Synthetic oligonucleotide
ttctcataagaacctaagtcct

SEQ ID NO: 5582 - DNA, 22 bp, Artificial Sequence
  Description of Artificial Sequence: Synthetic oligonucleotide
gataatatacacatgaaggcca

SEQ ID NO: 5583 - DNA, 22 bp, Artificial Sequence
  Description of Artificial Sequence: Synthetic oligonucleotide
attcctgatgattatctgggta

SEQ ID NO: 5584 - DNA, 22 bp, Artificial Sequence
  Description of Artificial Sequence: Synthetic oligonucleotide
ttggactttaacaacatggtgg

SEQ ID NO: 5585 - DNA, 22 bp, Artificial Sequence
  Description of Artificial Sequence: Synthetic oligonucleotide
attcaacaagacttcaacagct

SEQ ID NO: 5586 - DNA, 22 bp, Artificial Sequence
  Description of Artificial Sequence: Synthetic oligonucleotide
attcaagatcagtagcggtccc

SEQ ID NO: 5587 - DNA, 22 bp, Artificial Sequence
  Description of Artificial Sequence: Synthetic oligonucleotide
tattgagactccagtggcccat

SEQ ID NO: 5588 - DNA, 22 bp, Artificial Sequence
  Description of Artificial Sequence: Synthetic oligonucleotide
atatcttgtacttgggtgtcct

SEQ ID NO: 5589 - DNA, 22 bp, Artificial Sequence
  Description of Artificial Sequence: Synthetic oligonucleotide
taaacttatagcataggctcac

SEQ ID NO: 5590 - DNA, 22 bp, Artificial Sequence
  Description of Artificial Sequence: Synthetic oligonucleotide
ttctcctatgactgtataatgc

SEQ ID NO: 5591 - DNA, 22 bp, Artificial Sequence
  Description of Artificial Sequence: Synthetic oligonucleotide
tattggtttgcgaataagacct

SEQ ID NO: 5592 - DNA, 22 bp, Artificial Sequence
  Description of Artificial Sequence: Synthetic oligonucleotide
gaaattgatggcaaagtcatgg

SEQ ID NO: 5593 - DNA, 22 bp, Artificial Sequence
  Description of Artificial Sequence: Synthetic oligonucleotide
atatgttcatatattccctggt

SEQ ID NO: 5594 - DNA, 22 bp, Artificial Sequence
  Description of Artificial Sequence: Synthetic oligonucleotide
tttgttcaagtcatatatgcgt

SEQ ID NO: 5595 - DNA, 22 bp, Artificial Sequence
  Description of Artificial Sequence: Synthetic oligonucleotide
tttagtagaaagaatgactgct

SEQ ID NO: 5596 - DNA, 22 bp, Artificial Sequence
  Description of Artificial Sequence: Synthetic oligonucleotide
caatatcatcacggaaggatgg

SEQ ID NO: 5597 - DNA, 22 bp, Artificial Sequence
  Description of Artificial Sequence: Synthetic oligonucleotide
tttaatccttccagtatttgct

SEQ ID NO: 5598 - DNA, 22 bp, Artificial Sequence
  Description of Artificial Sequence: Synthetic oligonucleotide
aatgtttgtgaaatctcgtggt

SEQ ID NO: 5599 - DNA, 22 bp, Artificial Sequence
  Description of Artificial Sequence: Synthetic oligonucleotide
aatacttacgactcaataatcg

SEQ ID NO: 5600 - DNA, 22 bp, Artificial Sequence
  Description of Artificial Sequence: Synthetic oligonucleotide
ttcaagaataaaggtgagccac

SEQ ID NO: 5601 - DNA, 22 bp, Artificial Sequence
  Description of Artificial Sequence: Synthetic oligonucleotide
ttatactcaggtagtgactgca

SEQ ID NO: 5602 - DNA, 22 bp, Artificial Sequence
  Description of Artificial Sequence: Synthetic oligonucleotide
tttggaacagatatccagggcg

SEQ ID NO: 5603 - DNA, 22 bp, Artificial Sequence
  Description of Artificial Sequence: Synthetic oligonucleotide
gtaccatttcatgtctaggcct

SEQ ID NO: 5604 - DNA, 22 bp, Artificial Sequence
  Description of Artificial Sequence: Synthetic oligonucleotide
ttaaacttgaaatggctcggca

SEQ ID NO: 5605 - DNA, 22 bp, Artificial Sequence
  Description of Artificial Sequence: Synthetic oligonucleotide
tcctatacacagacaaacggtg

SEQ ID NO: 5606 - DNA, 22 bp, Artificial Sequence
  Description of Artificial Sequence: Synthetic oligonucleotide
taaatatgaagtttgagcaggc

SEQ ID NO: 5607 - DNA, 22 bp, Artificial Sequence
  Description of Artificial Sequence: Synthetic oligonucleotide
tttcctatacacagacaaacgg

SEQ ID NO: 5608 - DNA, 22 bp, Artificial Sequence
  Description of Artificial Sequence: Synthetic oligonucleotide
tattatggagcagaagtaagcc

SEQ ID NO: 5609 - DNA, 22 bp, Artificial Sequence
  Description of Artificial Sequence: Synthetic oligonucleotide
atatggccttcttagaacaggc

SEQ ID NO: 5610 - DNA, 22 bp, Artificial Sequence
  Description of Artificial Sequence: Synthetic oligonucleotide
ttgcacatgacagtgatgagtg

SEQ ID NO: 5611 - DNA, 22 bp, Artificial Sequence
  Description of Artificial Sequence: Synthetic oligonucleotide
tattccaatgaatgaaacatac

SEQ ID NO: 5612 - DNA, 22 bp, Artificial Sequence
  Description of Artificial Sequence: Synthetic oligonucleotide
ttaatcctgtagaatttctcca

SEQ ID NO: 5613 - DNA, 22 bp, Artificial Sequence
  Description of Artificial Sequence: Synthetic oligonucleotide
taagtgagaccttgaaggtggg

SEQ ID NO: 5614 - DNA, 22 bp, Artificial Sequence
  Description of Artificial Sequence: Synthetic oligonucleotide
aatgtaaaccaggccctatcat

SEQ ID NO: 5615 - DNA, 22 bp, Artificial Sequence
  Description of Artificial Sequence: Synthetic oligonucleotide
atttgatatgtacaaaccacat

SEQ ID NO: 5616 - DNA, 22 bp, Artificial Sequence
  Description of Artificial Sequence: Synthetic oligonucleotide
ttataactgcgtctcttctgct

SEQ ID NO: 5617 - DNA, 22 bp, Artificial Sequence
  Description of Artificial Sequence: Synthetic oligonucleotide
atattctgtgaataccattcct

SEQ ID NO: 5618 - DNA, 22 bp, Artificial Sequence
  Description of Artificial Sequence: Synthetic oligonucleotide
atcttccaagagtgcaattccc

SEQ ID NO: 5619 - DNA, 22 bp, Artificial Sequence
  Description of Artificial Sequence: Synthetic oligonucleotide
ttagcagacctcattaagtgag

SEQ ID NO: 5620 - DNA, 22 bp, Artificial Sequence
  Description of Artificial Sequence: Synthetic oligonucleotide
atttctgaaagtggaatttcct

SEQ ID NO: 5621 - DNA, 22 bp, Artificial Sequence
  Description of Artificial Sequence: Synthetic oligonucleotide
ttcttgacgtactcaaagtggg

SEQ ID NO: 5622 - DNA, 22 bp, Artificial Sequence
  Description of Artificial Sequence: Synthetic oligonucleotide
tatgcttagagtgttatctcca

SEQ ID NO: 5623 - DNA, 22 bp, Artificial Sequence
  Description of Artificial Sequence: Synthetic oligonucleotide
tattctgagcataggcacagtg

SEQ ID NO: 5624 - DNA, 22 bp, Artificial Sequence
  Description of Artificial Sequence: Synthetic oligonucleotide
ttaacaaataaacatacctctc

SEQ ID NO: 5625 - DNA, 22 bp, Artificial Sequence
  Description of Artificial Sequence: Synthetic oligonucleotide
taataatagcaataggcaaggc

SEQ ID NO: 5626 - DNA, 22 bp, Artificial Sequence
  Description of Artificial Sequence: Synthetic oligonucleotide
tatttcaacattagtttctggg

SEQ ID NO: 5627 - DNA, 22 bp, Artificial Sequence
  Description of Artificial Sequence: Synthetic oligonucleotide
ttatgttcaggaataagaacat

SEQ ID NO: 5628 - DNA, 22 bp, Artificial Sequence
  Description of Artificial Sequence: Synthetic oligonucleotide
ataaaggacactgtgaaggccc

SEQ ID NO: 5629 - DNA, 22 bp, Artificial Sequence
  Description of Artificial Sequence: Synthetic oligonucleotide
tttccttccaagaaatggtggc

SEQ ID NO: 5630 - DNA, 22 bp, Artificial Sequence
  Description of Artificial Sequence: Synthetic oligonucleotide
ttatgcagggccattctcagtc

SEQ ID NO: 5631 - DNA, 22 bp, Artificial Sequence
  Description of Artificial Sequence: Synthetic oligonucleotide
atagatataaatcaagtaggca

SEQ ID NO: 5632 - DNA, 22 bp, Artificial Sequence
  Description of Artificial Sequence: Synthetic oligonucleotide
tattgtatcaacacagatggat

SEQ ID NO: 5633 - DNA, 22 bp, Artificial Sequence
  Description of Artificial Sequence: Synthetic oligonucleotide
atgtacattaacactgtagcct

SEQ ID NO: 5634 - DNA, 22 bp, Artificial Sequence
  Description of Artificial Sequence: Synthetic oligonucleotide
ataagatgagaggcttctccgt

SEQ ID NO: 5635 - DNA, 22 bp, Artificial Sequence
  Description of Artificial Sequence: Synthetic oligonucleotide
taagattgcacatttgtcaggt

SEQ ID NO: 5636 - DNA, 22 bp, Artificial Sequence
  Description of Artificial Sequence: Synthetic oligonucleotide
aattactctgaggatcaatgcg

SEQ ID NO: 5637 - DNA, 22 bp, Artificial Sequence
  Description of Artificial Sequence: Synthetic oligonucleotide
tttgttatatagttccagagct

SEQ ID NO: 5638 - DNA, 22 bp, Artificial Sequence
  Description of Artificial Sequence: Synthetic oligonucleotide
tttcaggttggtatcacaagga

SEQ ID NO: 5639 - DNA, 22 bp, Artificial Sequence
  Description of Artificial Sequence: Synthetic oligonucleotide
atctttcttcaaatgatcccga

SEQ ID NO: 5640 - DNA, 22 bp, Artificial Sequence
  Description of Artificial Sequence: Synthetic oligonucleotide
ttcagctgttataaggctggcc

SEQ ID NO: 5641 - DNA, 22 bp, Artificial Sequence
  Description of Artificial Sequence: Synthetic oligonucleotide
tttaaaggcaacagtcttagga

SEQ ID NO: 5642 - DNA, 22 bp, Artificial Sequence
  Description of Artificial Sequence: Synthetic oligonucleotide
ttaggtaacagcagggaaagtc

SEQ ID NO: 5643 - DNA, 22 bp, Artificial Sequence
  Description of Artificial Sequence: Synthetic oligonucleotide
aattccatgcagatccagagtt

SEQ ID NO: 5644 - DNA, 22 bp, Artificial Sequence
  Description of Artificial Sequence: Synthetic oligonucleotide
tttaatatgttcataaaggcgc

SEQ ID NO: 5645 - DNA, 22 bp, Artificial Sequence
  Description of Artificial Sequence: Synthetic oligonucleotide
tttcaatgccagtacatgcctg

SEQ ID NO: 5646 - DNA, 22 bp, Artificial Sequence
  Description of Artificial Sequence: Synthetic oligonucleotide
attctcatcagcatcctctggc

SEQ ID NO: 5647 - DNA, 22 bp, Artificial Sequence
  Description of Artificial Sequence: Synthetic oligonucleotide
taacacgtcctgaggaccagcg

SEQ ID NO: 5648 - DNA, 22 bp, Artificial Sequence
  Description of Artificial Sequence: Synthetic oligonucleotide
ttaaacattgatttgaacttac

SEQ ID NO: 5649 - DNA, 22 bp, Artificial Sequence
  Description of Artificial Sequence: Synthetic oligonucleotide
acaaaggtatatatgatgccat

SEQ ID NO: 5650 - DNA, 22 bp, Artificial Sequence
  Description of Artificial Sequence: Synthetic oligonucleotide
atactcaaagatgtaacgccgc

SEQ ID NO: 5651 - DNA, 22 bp, Artificial Sequence
  Description of Artificial Sequence: Synthetic oligonucleotide
ttaattaaataagccctgtcca

SEQ ID NO: 5652 - DNA, 22 bp, Artificial Sequence
  Description of Artificial Sequence: Synthetic oligonucleotide
attcatgaccacaatgaaaggc

SEQ ID NO: 5653 - DNA, 22 bp, Artificial Sequence
  Description of Artificial Sequence: Synthetic oligonucleotide
tatagtttgtgctcaaagcgca

SEQ ID NO: 5654 - DNA, 22 bp, Artificial Sequence
  Description of Artificial Sequence: Synthetic oligonucleotide
ttagattctcgtactctttctt

SEQ ID NO: 5655 - DNA, 22 bp, Artificial Sequence
  Description of Artificial Sequence: Synthetic oligonucleotide
ctatcacttaagtctagatgga

SEQ ID NO: 5656 - DNA, 22 bp, Artificial Sequence
  Description of Artificial Sequence: Synthetic oligonucleotide
tttgagctttactgaacatcca

SEQ ID NO: 5657 - DNA, 22 bp, Artificial Sequence
  Description of Artificial Sequence: Synthetic oligonucleotide
taaatctatcagcttagcacca

SEQ ID NO: 5658 - DNA, 22 bp, Artificial Sequence
  Description of Artificial Sequence: Synthetic oligonucleotide
ttgttccacaatctggtctcct

SEQ ID NO: 5659 - DNA, 22 bp, Artificial Sequence
  Description of Artificial Sequence: Synthetic oligonucleotide
ttgagtgatgctattctggtgc

SEQ ID NO: 5660 - DNA, 22 bp, Artificial Sequence
  Description of Artificial Sequence: Synthetic oligonucleotide
ttacagaaatagtctcttcccg

SEQ ID NO: 5661 - DNA, 22 bp, Artificial Sequence
  Description of Artificial Sequence: Synthetic oligonucleotide
attctggatgacacaagtactt

SEQ ID NO: 5662 - DNA, 22 bp, Artificial Sequence
  Description of Artificial Sequence: Synthetic oligonucleotide
tttcttgttgatcaaaccaccg

SEQ ID NO: 5663 - DNA, 22 bp, Artificial Sequence
  Description of Artificial Sequence: Synthetic oligonucleotide
tagagagatgactatttgcggt

SEQ ID NO: 5664 - DNA, 22 bp, Artificial Sequence
  Description of Artificial Sequence: Synthetic oligonucleotide
ttctgaatacaccttcttacca

SEQ ID NO: 5665 - DNA, 22 bp, Artificial Sequence
  Description of Artificial Sequence: Synthetic oligonucleotide
tttactagtctcagtaatacat

SEQ ID NO: 5666 - DNA, 22 bp, Artificial Sequence
  Description of Artificial Sequence: Synthetic oligonucleotide
ttgcccatcagcaggactagcg

SEQ ID NO: 5667 - DNA, 22 bp, Artificial Sequence
  Description of Artificial Sequence: Synthetic oligonucleotide
atatcatagcaccgactgagtg

SEQ ID NO: 5668 - DNA, 22 bp, Artificial Sequence
  Description of Artificial Sequence: Synthetic oligonucleotide
taatataatctcaggaggacca

SEQ ID NO: 5669 - DNA, 22 bp, Artificial Sequence
  Description of Artificial Sequence: Synthetic oligonucleotide
aatttctaggtgcatactgcct

SEQ ID NO: 5670 - DNA, 22 bp, Artificial Sequence
  Description of Artificial Sequence: Synthetic oligonucleotide
atacaataacagtaattcacat

SEQ ID NO: 5671 - DNA, 22 bp, Artificial Sequence
  Description of Artificial Sequence: Synthetic oligonucleotide
ataaatagtgatcgtatttcca

SEQ ID NO: 5672 - DNA, 22 bp, Artificial Sequence
  Description of Artificial Sequence: Synthetic oligonucleotide
ttctcaactgggatgctggcat

SEQ ID NO: 5673 - DNA, 22 bp, Artificial Sequence
  Description of Artificial Sequence: Synthetic oligonucleotide
gtgaactatctcaagcaaggca

SEQ ID NO: 5674 - DNA, 22 bp, Artificial Sequence
  Description of Artificial Sequence: Synthetic oligonucleotide
aatactattcagatcaaatgaa

SEQ ID NO: 5675 - DNA, 22 bp, Artificial Sequence
  Description of Artificial Sequence: Synthetic oligonucleotide
tttatgttacaatttatactgc

SEQ ID NO: 5676 - DNA, 22 bp, Artificial Sequence
  Description of Artificial Sequence: Synthetic oligonucleotide
ttaaacattcacgtacaacgtg

SEQ ID NO: 5677 - DNA, 22 bp, Artificial Sequence
  Description of Artificial Sequence: Synthetic oligonucleotide
cttgctcaatactttcaaagcg

SEQ ID NO: 5678 - DNA, 22 bp, Artificial Sequence
  Description of Artificial Sequence: Synthetic oligonucleotide
aatactcttctgcattgggcct

SEQ ID NO: 5679 - DNA, 22 bp, Artificial Sequence
  Description of Artificial Sequence: Synthetic oligonucleotide
atttcatgaggtacgcaaggca

SEQ ID NO: 5680 - DNA, 22 bp, Artificial Sequence
  Description of Artificial Sequence: Synthetic oligonucleotide
tagtttatggagctcctcagct

SEQ ID NO: 5681 - DNA, 22 bp, Artificial Sequence
  Description of Artificial Sequence: Synthetic oligonucleotide
catagaaacaagactggatgga

SEQ ID NO: 5682 - DNA, 22 bp, Artificial Sequence
  Description of Artificial Sequence: Synthetic oligonucleotide
ttgaggtttctctttatatcct

SEQ ID NO: 5683 - DNA, 22 bp, Artificial Sequence
  Description of Artificial Sequence: Synthetic oligonucleotide
taatgtgatgaaagacgttgct

SEQ ID NO: 5684 - DNA, 22 bp, Artificial Sequence
  Description of Artificial Sequence: Synthetic oligonucleotide
tttaacataactagtatgttgt

SEQ ID NO: 5685 - DNA, 22 bp, Artificial Sequence
  Description of Artificial Sequence: Synthetic oligonucleotide
ttattcagcaatagcctcagca

SEQ ID NO: 5686 - DNA, 22 bp, Artificial Sequence
  Description of Artificial Sequence: Synthetic oligonucleotide
ttacagaggacctcctggagca

SEQ ID NO: 5687 - DNA, 22 bp, Artificial Sequence
  Description of Artificial Sequence: Synthetic oligonucleotide
ataaataaccctgagcataccc

SEQ ID NO: 5688 - DNA, 22 bp, Artificial Sequence
  Description of Artificial Sequence: Synthetic oligonucleotide
tagagtttacagtaacgaggca

SEQ ID NO: 5689 - DNA, 22 bp, Artificial Sequence
  Description of Artificial Sequence: Synthetic oligonucleotide
ttatcatagcgatacaactgcc

SEQ ID NO: 5690 - DNA, 22 bp, Artificial Sequence
  Description of Artificial Sequence: Synthetic oligonucleotide
ttacacagtgatcttaatagtt

SEQ ID NO: 5691 - DNA, 22 bp, Artificial Sequence
  Description of Artificial Sequence: Synthetic oligonucleotide
ttgatctcagaaatcatctcct

SEQ ID NO: 5692 - DNA, 22 bp, Artificial Sequence
  Description of Artificial Sequence: Synthetic oligonucleotide
tatacatttctctgtccctgag

SEQ ID NO: 5693 - DNA, 22 bp, Artificial Sequence
  Description of Artificial Sequence: Synthetic oligonucleotide
ataatataggctttcctcggca

SEQ ID NO: 5694 - DNA, 22 bp, Artificial Sequence
  Description of Artificial Sequence: Synthetic oligonucleotide
attcatctttatttaaggtgct

SEQ ID NO: 5695 - DNA, 22 bp, Artificial Sequence
  Description of Artificial Sequence: Synthetic oligonucleotide
tttatacatgtgggacaacctg

SEQ ID NO: 5696 - DNA, 22 bp, Artificial Sequence
  Description of Artificial Sequence: Synthetic oligonucleotide
tactcagacaagacaggaggcc

SEQ ID NO: 5697 - DNA, 22 bp, Artificial Sequence
  Description of Artificial Sequence: Synthetic oligonucleotide
ataatatacccttctcagtctt

SEQ ID NO: 5698 - DNA, 22 bp, Artificial Sequence
  Description of Artificial Sequence: Synthetic oligonucleotide
ttatatcttcaaagccaggcct

SEQ ID NO: 5699 - DNA, 22 bp, Artificial Sequence
  Description of Artificial Sequence: Synthetic oligonucleotide
ctttggttaatggttgtctgct

SEQ ID NO: 5700 - DNA, 22 bp, Artificial Sequence
  Description of Artificial Sequence: Synthetic oligonucleotide
ttgacctgccagacattgagct

SEQ ID NO: 5701 - DNA, 22 bp, Artificial Sequence
  Description of Artificial Sequence: Synthetic oligonucleotide
ttgtaatctctggagaagagca

SEQ ID NO: 5702 - DNA, 22 bp, Artificial Sequence
  Description of Artificial Sequence: Synthetic oligonucleotide
tattctccatagccactacggc

SEQ ID NO: 5703 - DNA, 22 bp, Artificial Sequence
  Description of Artificial Sequence: Synthetic oligonucleotide
tttcttccaaatgatgaatgct

SEQ ID NO: 5704 - DNA, 22 bp, Artificial Sequence
  Description of Artificial Sequence: Synthetic oligonucleotide
tattgtagtgaactactaggct

SEQ ID NO: 5705 - DNA, 22 bp, Artificial Sequence
  Description of Artificial Sequence: Synthetic oligonucleotide
atatgtcacaatttgagctgga

SEQ ID NO: 5706 - DNA, 22 bp, Artificial Sequence
  Description of Artificial Sequence: Synthetic oligonucleotide
ttcacaatccagctgaagagcc

SEQ ID NO: 5707 - DNA, 22 bp, Artificial Sequence
  Description of Artificial Sequence: Synthetic oligonucleotide
tttacatctgctactattctga

SEQ ID NO: 5708 - DNA, 22 bp, Artificial Sequence
  Description of Artificial Sequence: Synthetic oligonucleotide
ttaggttgagataatccaggcg

SEQ ID NO: 5709 - DNA, 22 bp, Artificial Sequence
  Description of Artificial Sequence: Synthetic oligonucleotide
attcagaagcatccaaacaggt

SEQ ID NO: 5710 - DNA, 22 bp, Artificial Sequence
  Description of Artificial Sequence: Synthetic oligonucleotide
tgaatgatccaccttgtctcat

SEQ ID NO: 5711 - DNA, 22 bp, Artificial Sequence
  Description of Artificial Sequence: Synthetic oligonucleotide
ttattgattgaagagattagga

SEQ ID NO: 5712 - DNA, 22 bp, Artificial Sequence
  Description of Artificial Sequence: Synthetic oligonucleotide
atttcagtgcaagataatgccc

SEQ ID NO: 5713 - DNA, 22 bp, Artificial Sequence
  Description of Artificial Sequence: Synthetic oligonucleotide
taagattctaaacaatacagct

SEQ ID NO: 5714 - DNA, 22 bp, Artificial Sequence
  Description of Artificial Sequence: Synthetic oligonucleotide
ttcatttgtctttcataatggg

SEQ ID NO: 5715 - DNA, 22 bp, Artificial Sequence
  Description of Artificial Sequence: Synthetic oligonucleotide
atacatgaagtgctggatagcc

SEQ ID NO: 5716 - DNA, 22 bp, Artificial Sequence
  Description of Artificial Sequence: Synthetic oligonucleotide
ttctattgttggaatgacagct

SEQ ID NO: 5717 - DNA, 22 bp, Artificial Sequence
  Description of Artificial Sequence: Synthetic oligonucleotide
ttctaccaaggatttgtcacca

SEQ ID NO: 5718 - DNA, 22 bp, Artificial Sequence
  Description of Artificial Sequence: Synthetic oligonucleotide
ttaaccttcttgagtaaatcct

SEQ ID NO: 5719 - DNA, 22 bp, Artificial Sequence
  Description of Artificial Sequence: Synthetic oligonucleotide
aatgagctaaagagattctctc

SEQ ID NO: 5720 - DNA, 22 bp, Artificial Sequence
  Description of Artificial Sequence: Synthetic oligonucleotide
ataacatatttcagcatgtccg

SEQ ID NO: 5721 - DNA, 22 bp, Artificial Sequence
  Description of Artificial Sequence: Synthetic oligonucleotide
tttaatgctcactgtggccctg

SEQ ID NO: 5722 - DNA, 22 bp, Artificial Sequence
  Description of Artificial Sequence: Synthetic oligonucleotide
aactacttggagatcaagggct

SEQ ID NO: 5723 - DNA, 22 bp, Artificial Sequence
  Description of Artificial Sequence: Synthetic oligonucleotide
attgatgaatatggtcaatggt

SEQ ID NO: 5724 - DNA, 22 bp, Artificial Sequence
  Description of Artificial Sequence: Synthetic oligonucleotide
ctttccaatcatctaggctgga

SEQ ID NO: 5725 - DNA, 22 bp, Artificial Sequence
  Description of Artificial Sequence: Synthetic oligonucleotide
ttaatgacttcatcattgagcc

SEQ ID NO: 5726 - DNA, 22 bp, Artificial Sequence
  Description of Artificial Sequence: Synthetic oligonucleotide
attatattcctcagtatttggg

SEQ ID NO: 5727 - DNA, 22 bp, Artificial Sequence
  Description of Artificial Sequence: Synthetic oligonucleotide
aactctttcaacatcagtaggt

SEQ ID NO: 5728 - DNA, 22 bp, Artificial Sequence
  Description of Artificial Sequence: Synthetic oligonucleotide
aatatttcggaggcaataagga

SEQ ID NO: 5729 - DNA, 22 bp, Artificial Sequence
  Description of Artificial Sequence: Synthetic oligonucleotide
atgactcataagaactactgcc

SEQ ID NO: 5730 - DNA, 22 bp, Artificial Sequence
  Description of Artificial Sequence: Synthetic oligonucleotide
atgcggtaccagtttagcacga

SEQ ID NO: 5731 - DNA, 22 bp, Artificial Sequence
  Description of Artificial Sequence: Synthetic oligonucleotide
ttctcaatgaacatagaggtcc

SEQ ID NO: 5732 - DNA, 22 bp, Artificial Sequence
  Description of Artificial Sequence: Synthetic oligonucleotide
ttgatgttgagttctactagca

SEQ ID NO: 5733 - DNA, 22 bp, Artificial Sequence
  Description of Artificial Sequence: Synthetic oligonucleotide
taaatgaagctgtggagcacgt

SEQ ID NO: 5734 - DNA, 22 bp, Artificial Sequence
  Description of Artificial Sequence: Synthetic oligonucleotide
ataaccagagaatctctctgct

SEQ ID NO: 5735 - DNA, 22 bp, Artificial Sequence
  Description of Artificial Sequence: Synthetic oligonucleotide
tttaataaagcccttcaaggtt

SEQ ID NO: 5736 - DNA, 22 bp, Artificial Sequence
  Description of Artificial Sequence: Synthetic oligonucleotide
ttaatagagaagggtaagtcct

SEQ ID NO: 5737 - DNA, 22 bp, Artificial Sequence
  Description of Artificial Sequence: Synthetic oligonucleotide
ttaacataactagtatgttgta

SEQ ID NO: 5738 - DNA, 22 bp, Artificial Sequence
  Description of Artificial Sequence: Synthetic oligonucleotide
tatagaaatggctggacttgga

SEQ ID NO: 5739 - DNA, 22 bp, Artificial Sequence
  Description of Artificial Sequence: Synthetic oligonucleotide
ataaacactgacaggagctccc

SEQ ID NO: 5740 - DNA, 22 bp, Artificial Sequence
  Description of Artificial Sequence: Synthetic oligonucleotide
ttacaagaggagaagggttggc

SEQ ID NO: 5741 - DNA, 22 bp, Artificial Sequence
  Description of Artificial Sequence: Synthetic oligonucleotide
aacttgtaaacctctgggcctg

SEQ ID NO: 5742 - DNA, 22 bp, Artificial Sequence
  Description of Artificial Sequence: Synthetic oligonucleotide
ttctgtggagatagtacacggc

SEQ ID NO: 5743 - DNA, 22 bp, Artificial Sequence
  Description of Artificial Sequence: Synthetic oligonucleotide
tttaagaatggatgtccgagga

SEQ ID NO: 5744 - DNA, 22 bp, Artificial Sequence
  Description of Artificial Sequence: Synthetic oligonucleotide
atttgcttcaatgcatattcct

SEQ ID NO: 5745 - DNA, 22 bp, Artificial Sequence
  Description of Artificial Sequence: Synthetic oligonucleotide
atacgaatacttaccagagcct

SEQ ID NO: 5746 - DNA, 22 bp, Artificial Sequence
  Description of Artificial Sequence: Synthetic oligonucleotide
tatcagaaagatacttcatgcc

SEQ ID NO: 5747 - DNA, 22 bp, Artificial Sequence
  Description of Artificial Sequence: Synthetic oligonucleotide
tattcaggagagatgggctggg

SEQ ID NO: 5748 - DNA, 22 bp, Artificial Sequence
  Description of Artificial Sequence: Synthetic oligonucleotide
tattccatgaccatacataggt

SEQ ID NO: 5749 - DNA, 22 bp, Artificial Sequence
  Description of Artificial Sequence: Synthetic oligonucleotide
aatatgatgaatttacgaagca

SEQ ID NO: 5750 - DNA, 22 bp, Artificial Sequence
  Description of Artificial Sequence: Synthetic oligonucleotide
ttattccgccagtcatttaggt

SEQ ID NO: 5751 - DNA, 22 bp, Artificial Sequence
  Description of Artificial Sequence: Synthetic oligonucleotide
tttaaggtcatgttacacagca

SEQ ID NO: 5752 - DNA, 22 bp, Artificial Sequence
  Description of Artificial Sequence: Synthetic oligonucleotide
aatacttctctaatgggcaggc

SEQ ID NO: 5753 - DNA, 22 bp, Artificial Sequence
  Description of Artificial Sequence: Synthetic oligonucleotide
atttcctccattgaagggcgct

SEQ ID NO: 5754 - DNA, 22 bp, Artificial Sequence
  Description of Artificial Sequence: Synthetic oligonucleotide
tttcatttgtagtgtgaaggct

SEQ ID NO: 5755 - DNA, 22 bp, Artificial Sequence
  Description of Artificial Sequence: Synthetic oligonucleotide
ttcaaagaggactcatttgggc

SEQ ID NO: 5756 - DNA, 22 bp, Artificial Sequence
  Description of Artificial Sequence: Synthetic oligonucleotide
tatcacagatacagttccagcc

SEQ ID NO: 5757 - DNA, 22 bp, Artificial Sequence
  Description of Artificial Sequence: Synthetic oligonucleotide
attcatatacccgacctgggct

SEQ ID NO: 5758 - DNA, 22 bp, Artificial Sequence
  Description of Artificial Sequence: Synthetic oligonucleotide
tttccttgctctcttatggcca

SEQ ID NO: 5759 - DNA, 22 bp, Artificial Sequence
  Description of Artificial Sequence: Synthetic oligonucleotide
taatgttctcagacatttgcct

SEQ ID NO: 5760 - DNA, 22 bp, Artificial Sequence
  Description of Artificial Sequence: Synthetic oligonucleotide
ttatgcttcataatgagcccga

SEQ ID NO: 5761 - DNA, 22 bp, Artificial Sequence
  Description of Artificial Sequence: Synthetic oligonucleotide
tttatctaagccactatcagcc

SEQ ID NO: 5762 - DNA, 22 bp, Artificial Sequence
  Description of Artificial Sequence: Synthetic oligonucleotide
ttattcatcaaggaggccagca

SEQ ID NO: 5763 - DNA, 22 bp, Artificial Sequence
  Description of Artificial Sequence: Synthetic oligonucleotide
tagtagtatgacctttacagct

SEQ ID NO: 5764 - DNA, 22 bp, Artificial Sequence
  Description of Artificial Sequence: Synthetic oligonucleotide
tttatgctccttgatttgggct

SEQ ID NO: 5765 - DNA, 22 bp, Artificial Sequence
  Description of Artificial Sequence: Synthetic oligonucleotide
atccctgaagagtaactgcggc

SEQ ID NO: 5766 - DNA, 22 bp, Artificial Sequence
  Description of Artificial Sequence: Synthetic oligonucleotide
aataaacatgtcaatagcagct

SEQ ID NO: 5767 - DNA, 22 bp, Artificial Sequence
  Description of Artificial Sequence: Synthetic oligonucleotide
atttcatacataatcactccca

SEQ ID NO: 5768 - DNA, 22 bp, Artificial Sequence
  Description of Artificial Sequence: Synthetic oligonucleotide
tttctttgcaaggttcttggca

SEQ ID NO: 5769 - DNA, 22 bp, Artificial Sequence
  Description of Artificial Sequence: Synthetic oligonucleotide
tatatctgaggtggaggcgcct

SEQ ID NO: 5770 - DNA, 22 bp, Artificial Sequence
  Description of Artificial Sequence: Synthetic oligonucleotide
taattcttcctctgggtctcgt

SEQ ID NO: 5771 - DNA, 22 bp, Artificial Sequence
  Description of Artificial Sequence: Synthetic oligonucleotide
tttgttaagactgtccattcca

SEQ ID NO: 5772 - DNA, 22 bp, Artificial Sequence
  Description of Artificial Sequence: Synthetic oligonucleotide
attgtgattgagggcataggct

SEQ ID NO: 5773 - DNA, 22 bp, Artificial Sequence
  Description of Artificial Sequence: Synthetic oligonucleotide
tttcattggaacaggatttggg

SEQ ID NO: 5774 - DNA, 22 bp, Artificial Sequence
  Description of Artificial Sequence: Synthetic oligonucleotide
tttcagaagcctcttcatggcc

SEQ ID NO: 5775 - DNA, 22 bp, Artificial Sequence
  Description of Artificial Sequence: Synthetic oligonucleotide
ttatgatattcttgtgtttccc

SEQ ID NO: 5776 - DNA, 22 bp, Artificial Sequence
  Description of Artificial Sequence: Synthetic oligonucleotide
atataacagcagcataatccca

SEQ ID NO: 5777 - DNA, 22 bp, Artificial Sequence
  Description of Artificial Sequence: Synthetic oligonucleotide
ttccacaaggtccttcttggcc

SEQ ID NO: 5778 - DNA, 22 bp, Artificial Sequence
  Description of Artificial Sequence: Synthetic oligonucleotide
ttatttaagatcttctgttgcc

SEQ ID NO: 5779 - DNA, 22 bp, Artificial Sequence
  Description of Artificial Sequence: Synthetic oligonucleotide
tatcagcttcaggagatatgcc

SEQ ID NO: 5780 - DNA, 22 bp, Artificial Sequence
  Description of Artificial Sequence: Synthetic oligonucleotide
tttagctcatccttgaaggcct

SEQ ID NO: 5781 - DNA, 22 bp, Artificial Sequence
  Description of Artificial Sequence: Synthetic oligonucleotide
tattgaagccggtctctgtggt

SEQ ID NO: 5782 - DNA, 22 bp, Artificial Sequence
  Description of Artificial Sequence: Synthetic oligonucleotide
tttaatacctgcctgagcaccg

SEQ ID NO: 5783 - DNA, 22 bp, Artificial Sequence
  Description of Artificial Sequence: Synthetic oligonucleotide
ataaggatttgcagaacaagcg

SEQ ID NO: 5784 - DNA, 22 bp, Artificial Sequence
  Description of Artificial Sequence: Synthetic oligonucleotide
aatgctctagatttgggctgga

SEQ ID NO: 5785 - DNA, 22 bp, Artificial Sequence
  Description of Artificial Sequence: Synthetic oligonucleotide
atacaagttgaactctttggca

SEQ ID NO: 5786 - DNA, 22 bp, Artificial Sequence
  Description of Artificial Sequence: Synthetic oligonucleotide
attctcaatccttatgtgagga

SEQ ID NO: 5787 - DNA, 22 bp, Artificial Sequence
  Description of Artificial Sequence: Synthetic oligonucleotide
tagaaacttcattgtcgctgcg

SEQ ID NO: 5788 - DNA, 22 bp, Artificial Sequence
  Description of Artificial Sequence: Synthetic oligonucleotide
atttctctggagatgtaagcga

SEQ ID NO: 5789 - DNA, 22 bp, Artificial Sequence
  Description of Artificial Sequence: Synthetic oligonucleotide
ttgaagagggagttggtgagct

SEQ ID NO: 5790 - DNA, 22 bp, Artificial Sequence
  Description of Artificial Sequence: Synthetic oligonucleotide
tttcccttgcagcaaatgaccc

SEQ ID NO: 5791 - DNA, 22 bp, Artificial Sequence
  Description of Artificial Sequence: Synthetic oligonucleotide
aatccctttctgattccctgca

SEQ ID NO: 5792 - DNA, 22 bp, Artificial Sequence
  Description of Artificial Sequence: Synthetic oligonucleotide
ttatacttccaagcctcctgca

SEQ ID NO: 5793 - DNA, 22 bp, Artificial Sequence
  Description of Artificial Sequence: Synthetic oligonucleotide
atattgtagtagagagaacgga

SEQ ID NO: 5794 - DNA, 22 bp, Artificial Sequence
  Description of Artificial Sequence: Synthetic oligonucleotide
ttaactcacaagactgcttgct

SEQ ID NO: 5795 - DNA, 22 bp, Artificial Sequence
  Description of Artificial Sequence: Synthetic oligonucleotide
ataaatctattcctgaactcct

SEQ ID NO: 5796 - DNA, 22 bp, Artificial Sequence
  Description of Artificial Sequence: Synthetic oligonucleotide
atagacttgcagtggttcaggt

SEQ ID NO: 5797 - DNA, 22 bp, Artificial Sequence
  Description of Artificial Sequence: Synthetic oligonucleotide
ataaacttgcccgtatgttcca

SEQ ID NO: 5798 - DNA, 22 bp, Artificial Sequence
  Description of Artificial Sequence: Synthetic oligonucleotide
atattggtccagctgaggtcga

SEQ ID NO: 5799 - DNA, 22 bp, Artificial Sequence
  Description of Artificial Sequence: Synthetic oligonucleotide
atagagaaaggtgaacttggct

SEQ ID NO: 5800 - DNA, 22 bp, Artificial Sequence
  Description of Artificial Sequence: Synthetic oligonucleotide
ttatcctccaagagaggacggc

SEQ ID NO: 5801 - DNA, 22 bp, Artificial Sequence
  Description of Artificial Sequence: Synthetic oligonucleotide
tttgcaaacaactccaaaggct

SEQ ID NO: 5802 - DNA, 22 bp, Artificial Sequence
  Description of Artificial Sequence: Synthetic oligonucleotide
atatctctccttaatagagcct

SEQ ID NO: 5803 - DNA, 22 bp, Artificial Sequence
  Description of Artificial Sequence: Synthetic oligonucleotide
ttaagttcagagagacattgga

SEQ ID NO: 5804 - DNA, 22 bp, Artificial Sequence
  Description of Artificial Sequence: Synthetic oligonucleotide
ttgtatccgtagtgcttgtcct

SEQ ID NO: 5805 - DNA, 22 bp, Artificial Sequence
  Description of Artificial Sequence: Synthetic oligonucleotide
ttatcacatgcttgactttggt

SEQ ID NO: 5806 - DNA, 22 bp, Artificial Sequence
  Description of Artificial Sequence: Synthetic oligonucleotide
attcttgttcctaatatgtcca

SEQ ID NO: 5807 - DNA, 22 bp, Artificial Sequence
  Description of Artificial Sequence: Synthetic oligonucleotide
atttgctgcaagtttattggct

SEQ ID NO: 5808 - DNA, 22 bp, Artificial Sequence
  Description of Artificial Sequence: Synthetic oligonucleotide
tttcattaagaaagtggctgca

SEQ ID NO: 5809 - DNA, 22 bp, Artificial Sequence
  Description of Artificial Sequence: Synthetic oligonucleotide
aatgcttaaacaacagtaaggc

SEQ ID NO: 5810 - DNA, 22 bp, Artificial Sequence
  Description of Artificial Sequence: Synthetic oligonucleotide
atactcttcaatgtgggctgcc

SEQ ID NO: 5811 - DNA, 22 bp, Artificial Sequence
  Description of Artificial Sequence: Synthetic oligonucleotide
tttctctgtcatttagtgtgca

SEQ ID NO: 5812 - DNA, 22 bp, Artificial Sequence
  Description of Artificial Sequence: Synthetic oligonucleotide
atgctggaagaggatgtagcgg

SEQ ID NO: 5813 - DNA, 22 bp, Artificial Sequence
  Description of Artificial Sequence: Synthetic oligonucleotide
taatcagttgtttcattcgccc

SEQ ID NO: 5814 - DNA, 22 bp, Artificial Sequence
  Description of Artificial Sequence: Synthetic oligonucleotide
tatttcatacagcgattatggt

SEQ ID NO: 5815 - DNA, 22 bp, Artificial Sequence
  Description of Artificial Sequence: Synthetic oligonucleotide
ttgttgacatagttgaccagct

SEQ ID NO: 5816 - DNA, 22 bp, Artificial Sequence
  Description of Artificial Sequence: Synthetic oligonucleotide
ttcggttgtgactttatttcct

SEQ ID NO: 5817 - DNA, 22 bp, Artificial Sequence
  Description of Artificial Sequence: Synthetic oligonucleotide
aatctcaacatcagaatctggc

SEQ ID NO: 5818 - DNA, 22 bp, Artificial Sequence
  Description of Artificial Sequence: Synthetic oligonucleotide
ttgatgaccacgaagatctgct

SEQ ID NO: 5819 - DNA, 22 bp, Artificial Sequence
  Description of Artificial Sequence: Synthetic oligonucleotide
taaagtttacagtagctcgcca

SEQ ID NO: 5820 - DNA, 22 bp, Artificial Sequence
  Description of Artificial Sequence: Synthetic oligonucleotide
aacaaatatgtcttgtatacca

SEQ ID NO: 5821 - DNA, 22 bp, Artificial Sequence
  Description of Artificial Sequence: Synthetic oligonucleotide
tttgatggtgggacactgtggc

SEQ ID NO: 5822 - DNA, 22 bp, Artificial Sequence
  Description of Artificial Sequence: Synthetic oligonucleotide
ttagaggaatagagtgggacgt

SEQ ID NO: 5823 - DNA, 22 bp, Artificial Sequence
  Description of Artificial Sequence: Synthetic oligonucleotide
ttaattgaccttgacttctggg

SEQ ID NO: 5824 - DNA, 22 bp, Artificial Sequence
  Description of Artificial Sequence: Synthetic oligonucleotide
ttagttctttggctaatgccgt

SEQ ID NO: 5825 - DNA, 22 bp, Artificial Sequence
  Description of Artificial Sequence: Synthetic oligonucleotide
tatacttggtcccttcttggct

SEQ ID NO: 5826 - DNA, 22 bp, Artificial Sequence
  Description of Artificial Sequence: Synthetic oligonucleotide
ttccatttcaacatcattacca

SEQ ID NO: 5827 - DNA, 22 bp, Artificial Sequence
  Description of Artificial Sequence: Synthetic oligonucleotide
ttagccttcaacagtttatgct

SEQ ID NO: 5828 - DNA, 22 bp, Artificial Sequence
  Description of Artificial Sequence: Synthetic oligonucleotide
ttgtcttataaactgaactgca

SEQ ID NO: 5829 - DNA, 22 bp, Artificial Sequence
  Description of Artificial Sequence: Synthetic oligonucleotide
atagatttcctcaatagcagct

SEQ ID NO: 5830 - DNA, 22 bp, Artificial Sequence
  Description of Artificial Sequence: Synthetic oligonucleotide
atatacagggtcagggagaggt

SEQ ID NO: 5831 - DNA, 22 bp, Artificial Sequence
  Description of Artificial Sequence: Synthetic oligonucleotide
attaagaagcatattattggcc

SEQ ID NO: 5832 - DNA, 22 bp, Artificial Sequence
  Description of Artificial Sequence: Synthetic oligonucleotide
tttcagaatgttcacctctcgt

SEQ ID NO: 5833 - DNA, 22 bp, Artificial Sequence
  Description of Artificial Sequence: Synthetic oligonucleotide
ttatctccactgagactgtccg

SEQ ID NO: 5834 - DNA, 22 bp, Artificial Sequence
  Description of Artificial Sequence: Synthetic oligonucleotide
ttcgaagaaaggatggttccgg

SEQ ID NO: 5835 - DNA, 22 bp, Artificial Sequence
  Description of Artificial Sequence: Synthetic oligonucleotide
tttaagtttaagatgtcatcca

SEQ ID NO: 5836 - DNA, 22 bp, Artificial Sequence
  Description of Artificial Sequence: Synthetic oligonucleotide
aaggatgatcttggaatcaccc

SEQ ID NO: 5837 - DNA, 22 bp, Artificial Sequence
  Description of Artificial Sequence: Synthetic oligonucleotide
aatcaagagtaaggcaatggct

SEQ ID NO: 5838 - DNA, 22 bp, Artificial Sequence
  Description of Artificial Sequence: Synthetic oligonucleotide
aagtagaaaggtaggatggcca

SEQ ID NO: 5839 - DNA, 22 bp, Artificial Sequence
  Description of Artificial Sequence: Synthetic oligonucleotide
tattaaactggtataatgtgct

SEQ ID NO: 5840 - DNA, 22 bp, Artificial Sequence
  Description of Artificial Sequence: Synthetic oligonucleotide
taaataagaaacttcagcagga

SEQ ID NO: 5841 - DNA, 22 bp, Artificial Sequence
  Description of Artificial Sequence: Synthetic oligonucleotide
tttctagaaacttctgaggcct

SEQ ID NO: 5842 - DNA, 22 bp, Artificial Sequence
  Description of Artificial Sequence: Synthetic oligonucleotide
tatggttagccgtttggatggg

SEQ ID NO: 5843 - DNA, 22 bp, Artificial Sequence
  Description of Artificial Sequence: Synthetic oligonucleotide
aatcaatatcagaatgaatgct

SEQ ID NO: 5844 - DNA, 22 bp, Artificial Sequence
  Description of Artificial Sequence: Synthetic oligonucleotide
attgcaaataagttcttgccca

SEQ ID NO: 5845 - DNA, 22 bp, Artificial Sequence
  Description of Artificial Sequence: Synthetic oligonucleotide
atattaggatggttcacacggg

SEQ ID NO: 5846 - DNA, 22 bp, Artificial Sequence
  Description of Artificial Sequence: Synthetic oligonucleotide
tatttgcatgacattctcagcc

SEQ ID NO: 5847 - DNA, 22 bp, Artificial Sequence
  Description of Artificial Sequence: Synthetic oligonucleotide
ataaataacactgatcccagcc

SEQ ID NO: 5848 - DNA, 22 bp, Artificial Sequence
  Description of Artificial Sequence: Synthetic oligonucleotide
atatcaaatcagcaaggaaggt

SEQ ID NO: 5849 - DNA, 22 bp, Artificial Sequence
  Description of Artificial Sequence: Synthetic oligonucleotide
atacagtcctccttcagggcgt

SEQ ID NO: 5850 - DNA, 22 bp, Artificial Sequence
  Description of Artificial Sequence: Synthetic oligonucleotide
attgaagatcaaggtgatgggc

SEQ ID NO: 5851 - DNA, 22 bp, Artificial Sequence
  Description of Artificial Sequence: Synthetic oligonucleotide
ataagactcaatgtccagtcct

SEQ ID NO: 5852 - DNA, 22 bp, Artificial Sequence
  Description of Artificial Sequence: Synthetic oligonucleotide
attctgaatgtgtttcagagct

SEQ ID NO: 5853 - DNA, 22 bp, Artificial Sequence
  Description of Artificial Sequence: Synthetic oligonucleotide
taatttgcagagtttctaaggc

SEQ ID NO: 5854 - DNA, 22 bp, Artificial Sequence
  Description of Artificial Sequence: Synthetic oligonucleotide
ttaatggcaaaggtcttgagct

SEQ ID NO: 5855 - DNA, 22 bp, Artificial Sequence
  Description of Artificial Sequence: Synthetic oligonucleotide
attcatgttaaagagcggtggt

SEQ ID NO: 5856 - DNA, 22 bp, Artificial Sequence
  Description of Artificial Sequence: Synthetic oligonucleotide
aattactgtgagaggaatagcg

SEQ ID NO: 5857 - DNA, 22 bp, Artificial Sequence
  Description of Artificial Sequence: Synthetic oligonucleotide
tatcctcaagaggttgaatcct

SEQ ID NO: 5858 - DNA, 22 bp, Artificial Sequence
  Description of Artificial Sequence: Synthetic oligonucleotide
atttcttatgttcaccaccggt

SEQ ID NO: 5859 - DNA, 22 bp, Artificial Sequence
  Description of Artificial Sequence: Synthetic oligonucleotide
tatccttaatactgagagtggt

SEQ ID NO: 5860 - DNA, 22 bp, Artificial Sequence
  Description of Artificial Sequence: Synthetic oligonucleotide
aataaggagttcccacataggt

SEQ ID NO: 5861 - DNA, 22 bp, Artificial Sequence
  Description of Artificial Sequence: Synthetic oligonucleotide
aatgcaatcacattagggtgct

SEQ ID NO: 5862 - DNA, 22 bp, Artificial Sequence
  Description of Artificial Sequence: Synthetic oligonucleotide
ttcaggaagcagagcatgtgcc

SEQ ID NO: 5863 - DNA, 22 bp, Artificial Sequence
  Description of Artificial Sequence: Synthetic oligonucleotide
atcttctatgaatctggcaggc

SEQ ID NO: 5864 - DNA, 22 bp, Artificial Sequence
  Description of Artificial Sequence: Synthetic oligonucleotide
atatctaatgcagcagttccca

SEQ ID NO: 5865 - DNA, 22 bp, Artificial Sequence
  Description of Artificial Sequence: Synthetic oligonucleotide
tttctttgggaaacaataacct

SEQ ID NO: 5866 - DNA, 22 bp, Artificial Sequence
  Description of Artificial Sequence: Synthetic oligonucleotide
attgtcacccactgtaaatggc

SEQ ID NO: 5867 - DNA, 22 bp, Artificial Sequence
  Description of Artificial Sequence: Synthetic oligonucleotide
ttaatgaatctaagtctagcct

SEQ ID NO: 5868 - DNA, 22 bp, Artificial Sequence
  Description of Artificial Sequence: Synthetic oligonucleotide
tttacacgaaagggaacagcca

SEQ ID NO: 5869 - DNA, 22 bp, Artificial Sequence
  Description of Artificial Sequence: Synthetic oligonucleotide
ttggtaataaacttacattccc

SEQ ID NO: 5870 - DNA, 22 bp, Artificial Sequence
  Description of Artificial Sequence: Synthetic oligonucleotide
taatactgagagtggttaagct

SEQ ID NO: 5871 - DNA, 22 bp, Artificial Sequence
  Description of Artificial Sequence: Synthetic oligonucleotide
tttctactgcataccgaaacgt

SEQ ID NO: 5872 - DNA, 22 bp, Artificial Sequence
  Description of Artificial Sequence: Synthetic oligonucleotide
atactttaaggtaacaagtcca

SEQ ID NO: 5873 - DNA, 22 bp, Artificial Sequence
  Description of Artificial Sequence: Synthetic oligonucleotide
atatttaaagcgatcagctcgg

SEQ ID NO: 5874 - DNA, 22 bp, Artificial Sequence
  Description of Artificial Sequence: Synthetic oligonucleotide
tttaaacctcagcttaactgca

SEQ ID NO: 5875 - DNA, 22 bp, Artificial Sequence
  Description of Artificial Sequence: Synthetic oligonucleotide
tttctcttcatctgctaatcct

SEQ ID NO: 5876 - DNA, 22 bp, Artificial Sequence
  Description of Artificial Sequence: Synthetic oligonucleotide
ttaaacatctgcttgactagga

SEQ ID NO: 5877 - DNA, 22 bp, Artificial Sequence
  Description of Artificial Sequence: Synthetic oligonucleotide
atcctctatgaatctggcaggc

SEQ ID NO: 5878 - DNA, 22 bp, Artificial Sequence
  Description of Artificial Sequence: Synthetic oligonucleotide
atgtatggaaggttattcccgg

SEQ ID NO: 5879 - DNA, 22 bp, Artificial Sequence
  Description of Artificial Sequence: Synthetic oligonucleotide
ttcctcttggagaagatcagcc

SEQ ID NO: 5880 - DNA, 22 bp, Artificial Sequence
  Description of Artificial Sequence: Synthetic oligonucleotide
tttcatactgatgtttcttggt

SEQ ID NO: 5881 - DNA, 22 bp, Artificial Sequence
  Description of Artificial Sequence: Synthetic oligonucleotide
atcttctatgaacctggcaggc

SEQ ID NO: 5882 - DNA, 22 bp, Artificial Sequence
  Description of Artificial Sequence: Synthetic oligonucleotide
ttcagaagcctcttcatggccc

SEQ ID NO: 5883 - DNA, 22 bp, Artificial Sequence
  Description of Artificial Sequence: Synthetic oligonucleotide
atattccattacaagccatgct

SEQ ID NO: 5884 - DNA, 22 bp, Artificial Sequence
  Description of Artificial Sequence: Synthetic oligonucleotide
ttcatgttgctttatacatcct

SEQ ID NO: 5885 - DNA, 22 bp, Artificial Sequence
  Description of Artificial Sequence: Synthetic oligonucleotide
ttcttgtagggcttctggccgt

SEQ ID NO: 5886 - DNA, 22 bp, Artificial Sequence
  Description of Artificial Sequence: Synthetic oligonucleotide
taaagacatgctcttctctctt

SEQ ID NO: 5887 - DNA, 22 bp, Artificial Sequence
  Description of Artificial Sequence: Synthetic oligonucleotide
aataatggcaaagccatttcca

SEQ ID NO: 5888 - DNA, 22 bp, Artificial Sequence
  Description of Artificial Sequence: Synthetic oligonucleotide
aatactgtagatacacatggct

SEQ ID NO: 5889 - DNA, 22 bp, Artificial Sequence
  Description of Artificial Sequence: Synthetic oligonucleotide
atatcaaaggagtgggagtggt

SEQ ID NO: 5890 - DNA, 22 bp, Artificial Sequence
  Description of Artificial Sequence: Synthetic oligonucleotide
tttgcatttctgccacttggcc

SEQ ID NO: 5891 - DNA, 22 bp, Artificial Sequence
  Description of Artificial Sequence: Synthetic oligonucleotide
tgaactaaacaggttgaaaggg

SEQ ID NO: 5892 - DNA, 22 bp, Artificial Sequence
  Description of Artificial Sequence: Synthetic oligonucleotide
tttatgcaagaaagccagggca

SEQ ID NO: 5893 - DNA, 22 bp, Artificial Sequence
  Description of Artificial Sequence: Synthetic oligonucleotide
attcctgtgccttcaatttgct

SEQ ID NO: 5894 - DNA, 22 bp, Artificial Sequence
  Description of Artificial Sequence: Synthetic oligonucleotide
atggacttccatgtacttggcc

SEQ ID NO: 5895 - DNA, 22 bp, Artificial Sequence
  Description of Artificial Sequence: Synthetic oligonucleotide
atttcttctaaatttgctgcct

SEQ ID NO: 5896 - DNA, 22 bp, Artificial Sequence
  Description of Artificial Sequence: Synthetic oligonucleotide
tattctgtcttggttgcaagct

SEQ ID NO: 5897 - DNA, 22 bp, Artificial Sequence
  Description of Artificial Sequence: Synthetic oligonucleotide
tttggctttcctcaaagttcct

SEQ ID NO: 5898 - DNA, 22 bp, Artificial Sequence
  Description of Artificial Sequence: Synthetic oligonucleotide
ttatgctcctcttcctgttcct

SEQ ID NO: 5899 - DNA, 22 bp, Artificial Sequence
  Description of Artificial Sequence: Synthetic oligonucleotide
ttaggatgtcagcaaatttcca

SEQ ID NO: 5900 - DNA, 22 bp, Artificial Sequence
  Description of Artificial Sequence: Synthetic oligonucleotide
tttcctaagaaactgtaatgct

SEQ ID NO: 5901 - DNA, 22 bp, Artificial Sequence
  Description of Artificial Sequence: Synthetic oligonucleotide
atctgctaaggctataacacgt

SEQ ID NO: 5902 - DNA, 22 bp, Artificial Sequence
  Description of Artificial Sequence: Synthetic oligonucleotide
ataaacattaccaaactttcct

SEQ ID NO: 5903 - DNA, 22 bp, Artificial Sequence
  Description of Artificial Sequence: Synthetic oligonucleotide
ttacttattcttattaagcgcc

SEQ ID NO: 5904 - DNA, 22 bp, Artificial Sequence
  Description of Artificial Sequence: Synthetic oligonucleotide
attacaaatgttgacatcagcg

SEQ ID NO: 5905 - DNA, 22 bp, Artificial Sequence
  Description of Artificial Sequence: Synthetic oligonucleotide
tttagttctctccttggcagcg

SEQ ID NO: 5906 - DNA, 22 bp, Artificial Sequence
  Description of Artificial Sequence: Synthetic oligonucleotide
taatccaaagaagagatatggt

SEQ ID NO: 5907 - DNA, 22 bp, Artificial Sequence
  Description of Artificial Sequence: Synthetic oligonucleotide
tttctggtccataaacaaggca

SEQ ID NO: 5908 - DNA, 22 bp, Artificial Sequence
  Description of Artificial Sequence: Synthetic oligonucleotide
atttgttaaagcagaggctgcg

SEQ ID NO: 5909 - DNA, 22 bp, Artificial Sequence
  Description of Artificial Sequence: Synthetic oligonucleotide
attctcctttataaagtgtgct

SEQ ID NO: 5910 - DNA, 22 bp, Artificial Sequence
  Description of Artificial Sequence: Synthetic oligonucleotide
taacaacagttgattagatccc

SEQ ID NO: 5911 - DNA, 22 bp, Artificial Sequence
  Description of Artificial Sequence: Synthetic oligonucleotide
ttaaagatgaattaaatgccca

SEQ ID NO: 5912 - DNA, 22 bp, Artificial Sequence
  Description of Artificial Sequence: Synthetic oligonucleotide
atttcttgagatcatcccaggc

SEQ ID NO: 5913 - DNA, 22 bp, Artificial Sequence
  Description of Artificial Sequence: Synthetic oligonucleotide
taaagcaggtatgggccttcgg

SEQ ID NO: 5914 - DNA, 22 bp, Artificial Sequence
  Description of Artificial Sequence: Synthetic oligonucleotide
ttataaccaaagacaaggacca

SEQ ID NO: 5915 - DNA, 22 bp, Artificial Sequence
  Description of Artificial Sequence: Synthetic oligonucleotide
atctaactggatattctgggcc

SEQ ID NO: 5916 - DNA, 22 bp, Artificial Sequence
  Description of Artificial Sequence: Synthetic oligonucleotide
atatcaacagggagaggaccca

SEQ ID NO: 5917 - DNA, 22 bp, Artificial Sequence
  Description of Artificial Sequence: Synthetic oligonucleotide
ataaaggattagtttacttcct

SEQ ID NO: 5918 - DNA, 22 bp, Artificial Sequence
  Description of Artificial Sequence: Synthetic oligonucleotide
taaagtaccaagatggcgggca

SEQ ID NO: 5919 - DNA, 22 bp, Artificial Sequence
  Description of Artificial Sequence: Synthetic oligonucleotide
taacagctataaatccattgct

SEQ ID NO: 5920 - DNA, 22 bp, Artificial Sequence
  Description of Artificial Sequence: Synthetic oligonucleotide
ttcaccaataggttggagggct

SEQ ID NO: 5921 - DNA, 22 bp, Artificial Sequence
  Description of Artificial Sequence: Synthetic oligonucleotide
attacatacagaatactgacgt

SEQ ID NO: 5922 - DNA, 22 bp, Artificial Sequence
  Description of Artificial Sequence: Synthetic oligonucleotide
tttgtttctcagagtgattgct

SEQ ID NO: 5923 - DNA, 22 bp, Artificial Sequence
  Description of Artificial Sequence: Synthetic oligonucleotide
atagactggtcggtgacgtggt

SEQ ID NO: 5924 - DNA, 22 bp, Artificial Sequence
  Description of Artificial Sequence: Synthetic oligonucleotide
ttatatcttcatcctgaatccc

SEQ ID NO: 5925 - DNA, 22 bp, Artificial Sequence
  Description of Artificial Sequence: Synthetic oligonucleotide
tttagtgcccagaatataacca

SEQ ID NO: 5926 - DNA, 22 bp, Artificial Sequence
  Description of Artificial Sequence: Synthetic oligonucleotide
ttggaatttcaaatgatttggt

SEQ ID NO: 5927 - DNA, 22 bp, Artificial Sequence
  Description of Artificial Sequence: Synthetic oligonucleotide
tattccttggaggcccatagga

SEQ ID NO: 5928 - DNA, 22 bp, Artificial Sequence
  Description of Artificial Sequence: Synthetic oligonucleotide
atatatcaaggtcctatcagct

SEQ ID NO: 5929 - DNA, 22 bp, Artificial Sequence
  Description of Artificial Sequence: Synthetic oligonucleotide
atttccttgcatgaagattcgg

SEQ ID NO: 5930 - DNA, 22 bp, Artificial Sequence
  Description of Artificial Sequence: Synthetic oligonucleotide
tttggttactactagatcagct

SEQ ID NO: 5931 - DNA, 22 bp, Artificial Sequence
  Description of Artificial Sequence: Synthetic oligonucleotide
ttgttgatgaggatagtgtccc

SEQ ID NO: 5932 - DNA, 22 bp, Artificial Sequence
  Description of Artificial Sequence: Synthetic oligonucleotide
taatacaaggaggcatattgct

SEQ ID NO: 5933 - DNA, 22 bp, Artificial Sequence
  Description of Artificial Sequence: Synthetic oligonucleotide
ttaagctggattctaacttgcc

SEQ ID NO: 5934 - DNA, 22 bp, Artificial Sequence
  Description of Artificial Sequence: Synthetic oligonucleotide
taaactgaccactatctggcca

SEQ ID NO: 5935 - DNA, 22 bp, Artificial Sequence
  Description of Artificial Sequence: Synthetic oligonucleotide
attaactaatagctccaagcct

SEQ ID NO: 5936 - DNA, 22 bp, Artificial Sequence
  Description of Artificial Sequence: Synthetic oligonucleotide
ttacatctccacagatccaggg

SEQ ID NO: 5937 - DNA, 22 bp, Artificial Sequence
  Description of Artificial Sequence: Synthetic oligonucleotide
tttagcttcctgctgatctgcc

SEQ ID NO: 5938 - DNA, 22 bp, Artificial Sequence
  Description of Artificial Sequence: Synthetic oligonucleotide
atagaatctctgtgaaccagca

SEQ ID NO: 5939 - DNA, 22 bp, Artificial Sequence
  Description of Artificial Sequence: Synthetic oligonucleotide
tttatgtcccagtggatgacca

SEQ ID NO: 5940 - DNA, 22 bp, Artificial Sequence
  Description of Artificial Sequence: Synthetic oligonucleotide
ttaacgtgtgaatgcaattccc

SEQ ID NO: 5941 - DNA, 22 bp, Artificial Sequence
  Description of Artificial Sequence: Synthetic oligonucleotide
ttcatctgaaatctcttctgcc

SEQ ID NO: 5942 - DNA, 22 bp, Artificial Sequence
  Description of Artificial Sequence: Synthetic oligonucleotide
tttatatctgcgtagcctggct

SEQ ID NO: 5943 - DNA, 22 bp, Artificial Sequence
  Description of Artificial Sequence: Synthetic oligonucleotide
atttacttcctccagcatagcc

SEQ ID NO: 5944 - DNA, 22 bp, Artificial Sequence
  Description of Artificial Sequence: Synthetic oligonucleotide
tagtggtttcaatgaactgggc

SEQ ID NO: 5945 - DNA, 22 bp, Artificial Sequence
  Description of Artificial Sequence: Synthetic oligonucleotide
ttagtctcaaggacagactgcc

SEQ ID NO: 5946 - DNA, 22 bp, Artificial Sequence
  Description of Artificial Sequence: Synthetic oligonucleotide
taaatccctgtgaataattcca

SEQ ID NO: 5947 - DNA, 22 bp, Artificial Sequence
  Description of Artificial Sequence: Synthetic oligonucleotide
ttgagcctgcagtttgtaagcg

SEQ ID NO: 5948 - DNA, 22 bp, Artificial Sequence
  Description of Artificial Sequence: Synthetic oligonucleotide
atgtcataccagtagtccgcgt

SEQ ID NO: 5949 - DNA, 22 bp, Artificial Sequence
  Description of Artificial Sequence: Synthetic oligonucleotide
tattccatgaccagataaaggt

SEQ ID NO: 5950 - DNA, 22 bp, Artificial Sequence
  Description of Artificial Sequence: Synthetic oligonucleotide
atggtcattgctccttagtccc

SEQ ID NO: 5951 - DNA, 22 bp, Artificial Sequence
  Description of Artificial Sequence: Synthetic oligonucleotide
atatggattcaactgctgtcct

SEQ ID NO: 5952 - DNA, 22 bp, Artificial Sequence
  Description of Artificial Sequence: Synthetic oligonucleotide
taaacatcgaagtgcttctgga

SEQ ID NO: 5953 - DNA, 22 bp, Artificial Sequence
  Description of Artificial Sequence: Synthetic oligonucleotide
tttaggtctgaaatattcacca

SEQ ID NO: 5954 - DNA, 22 bp, Artificial Sequence
  Description of Artificial Sequence: Synthetic oligonucleotide
tttccttgtactccagtctcga

SEQ ID NO: 5955 - DNA, 22 bp, Artificial Sequence
  Description of Artificial Sequence: Synthetic oligonucleotide
atatgctcttctgtaatgccca

SEQ ID NO: 5956 - DNA, 22 bp, Artificial Sequence
  Description of Artificial Sequence: Synthetic oligonucleotide
ttaggagacgtatcttcctcgt

SEQ ID NO: 5957 - DNA, 22 bp, Artificial Sequence
  Description of Artificial Sequence: Synthetic oligonucleotide
ttataagaagatgtggtgcgga

SEQ ID NO: 5958 - DNA, 22 bp, Artificial Sequence
  Description of Artificial Sequence: Synthetic oligonucleotide
aatactcagtggagaaactggg

SEQ ID NO: 5959 - DNA, 22 bp, Artificial Sequence
  Description of Artificial Sequence: Synthetic oligonucleotide
tttagcttcattatcttctgct

SEQ ID NO: 5960 - DNA, 22 bp, Artificial Sequence
  Description of Artificial Sequence: Synthetic oligonucleotide
tttctctattattggagatggt

SEQ ID NO: 5961 - DNA, 22 bp, Artificial Sequence
  Description of Artificial Sequence: Synthetic oligonucleotide
ttctcattgaagtggagctcct

SEQ ID NO: 5962 - DNA, 22 bp, Artificial Sequence
  Description of Artificial Sequence: Synthetic oligonucleotide
tttgatttctatagggattgct

SEQ ID NO: 5963 - DNA, 22 bp, Artificial Sequence
  Description of Artificial Sequence: Synthetic oligonucleotide
atttctatcaccatgatcccga

SEQ ID NO: 5964 - DNA, 22 bp, Artificial Sequence
  Description of Artificial Sequence: Synthetic oligonucleotide
atttctaacaactgaatgggcg

SEQ ID NO: 5965 - DNA, 22 bp, Artificial Sequence
  Description of Artificial Sequence: Synthetic oligonucleotide
atttgtagtccggttctgtggt

SEQ ID NO: 5966 - DNA, 22 bp, Artificial Sequence
  Description of Artificial Sequence: Synthetic oligonucleotide
ttactctgtaactcagcttcca

SEQ ID NO: 5967 - DNA, 22 bp, Artificial Sequence
  Description of Artificial Sequence: Synthetic oligonucleotide
aattgggatgacacaggaaggg

SEQ ID NO: 5968 - DNA, 22 bp, Artificial Sequence
  Description of Artificial Sequence: Synthetic oligonucleotide
attatgaagccctgggtatgct

SEQ ID NO: 5969 - DNA, 22 bp, Artificial Sequence
  Description of Artificial Sequence: Synthetic oligonucleotide
attaagtagtatattaaggcca

SEQ ID NO: 5970 - DNA, 22 bp, Artificial Sequence
  Description of Artificial Sequence: Synthetic oligonucleotide
aaggaattaaagatgcatgcca

SEQ ID NO: 5971 - DNA, 22 bp, Artificial Sequence
  Description of Artificial Sequence: Synthetic oligonucleotide
ttgctgtaagagtcagtgtccg

SEQ ID NO: 5972 - DNA, 22 bp, Artificial Sequence
  Description of Artificial Sequence: Synthetic oligonucleotide
tttggttctgaaagggtctgct

SEQ ID NO: 5973 - DNA, 22 bp, Artificial Sequence
  Description of Artificial Sequence: Synthetic oligonucleotide
ttagaaactgagtaaattccct

SEQ ID NO: 5974 - DNA, 22 bp, Artificial Sequence
  Description of Artificial Sequence: Synthetic oligonucleotide
tatcccaaaccctaagagtggc

SEQ ID NO: 5975 - DNA, 22 bp, Artificial Sequence
  Description of Artificial Sequence: Synthetic oligonucleotide
ataatatgccacaagtcatgct

SEQ ID NO: 5976 - DNA, 22 bp, Artificial Sequence
  Description of Artificial Sequence: Synthetic oligonucleotide
ttactcatacatttcttctgcc

SEQ ID NO: 5977 - DNA, 22 bp, Artificial Sequence
  Description of Artificial Sequence: Synthetic oligonucleotide
attatgaaacaccaaagtggca

SEQ ID NO: 5978 - DNA, 22 bp, Artificial Sequence
  Description of Artificial Sequence: Synthetic oligonucleotide
ttctgtgatcatgctcagtgct

SEQ ID NO: 5979 - DNA, 22 bp, Artificial Sequence
  Description of Artificial Sequence: Synthetic oligonucleotide
ttattccagctataatgcaggt

SEQ ID NO: 5980 - DNA, 22 bp, Artificial Sequence
  Description of Artificial Sequence: Synthetic oligonucleotide
tatcatccacatggaacaaccc

SEQ ID NO: 5981 - DNA, 22 bp, Artificial Sequence
  Description of Artificial Sequence: Synthetic oligonucleotide
aattctaatgccagaggctggg

SEQ ID NO: 5982 - DNA, 22 bp, Artificial Sequence
  Description of Artificial Sequence: Synthetic oligonucleotide
ttgagtctgaagctttagtggc

SEQ ID NO: 5983 - DNA, 22 bp, Artificial Sequence
  Description of Artificial Sequence: Synthetic oligonucleotide
attctccaatagcgactgtcca

SEQ ID NO: 5984 - DNA, 22 bp, Artificial Sequence
  Description of Artificial Sequence: Synthetic oligonucleotide
attggcatagacagtcgtgcct

SEQ ID NO: 5985 - DNA, 22 bp, Artificial Sequence
  Description of Artificial Sequence: Synthetic oligonucleotide
aatatatctcaatgtcggtgga

SEQ ID NO: 5986 - DNA, 22 bp, Artificial Sequence
  Description of Artificial Sequence: Synthetic oligonucleotide
ttgtttgaaatacacatggccc

SEQ ID NO: 5987 - DNA, 22 bp, Artificial Sequence
  Description of Artificial Sequence: Synthetic oligonucleotide
taatcttaaggatcaggatgca

SEQ ID NO: 5988 - DNA, 22 bp, Artificial Sequence
  Description of Artificial Sequence: Synthetic oligonucleotide
attcagataattaggatctcga

SEQ ID NO: 5989 - DNA, 22 bp, Artificial Sequence
  Description of Artificial Sequence: Synthetic oligonucleotide
taagatgatgtaatactctggt

SEQ ID NO: 5990 - DNA, 22 bp, Artificial Sequence
  Description of Artificial Sequence: Synthetic oligonucleotide
taataatatgacagcattgcct

SEQ ID NO: 5991 - DNA, 22 bp, Artificial Sequence
  Description of Artificial Sequence: Synthetic oligonucleotide
ttaatataatgagttccatcct

SEQ ID NO: 5992 - DNA, 22 bp, Artificial Sequence
  Description of Artificial Sequence: Synthetic oligonucleotide
ttggcaaagataagttaaccgc

SEQ ID NO: 5993 - DNA, 22 bp, Artificial Sequence
  Description of Artificial Sequence: Synthetic oligonucleotide
tttggaatctacattcactgct

SEQ ID NO: 5994 - DNA, 22 bp, Artificial Sequence
  Description of Artificial Sequence: Synthetic oligonucleotide
ttcaaataagccataatatggg

SEQ ID NO: 5995 - DNA, 22 bp, Artificial Sequence
  Description of Artificial Sequence: Synthetic oligonucleotide
tatagacttgtccataggtgcc

SEQ ID NO: 5996 - DNA, 22 bp, Artificial Sequence
  Description of Artificial Sequence: Synthetic oligonucleotide
tttctgattcatcatcactgct

SEQ ID NO: 5997 - DNA, 22 bp, Artificial Sequence
  Description of Artificial Sequence: Synthetic oligonucleotide
tatctataagacaaaggcggcc

SEQ ID NO: 5998 - DNA, 22 bp, Artificial Sequence
  Description of Artificial Sequence: Synthetic oligonucleotide
taagccctctcttataaatcct

SEQ ID NO: 5999 - DNA, 22 bp, Artificial Sequence
  Description of Artificial Sequence: Synthetic oligonucleotide
tttgactttgaggtagtttggc

SEQ ID NO: 6000 - DNA, 22 bp, Artificial Sequence
  Description of Artificial Sequence: Synthetic oligonucleotide
tttggttattacaaggaatgcc

SEQ ID NO: 6001 - DNA, 22 bp, Artificial Sequence
  Description of Artificial Sequence: Synthetic oligonucleotide
attaagcgccagctttaatgct

SEQ ID NO: 6002 - DNA, 22 bp, Artificial Sequence
  Description of Artificial Sequence: Synthetic oligonucleotide
ataagatatcaggatctttgct

SEQ ID NO: 6003 - DNA, 22 bp, Artificial Sequence
  Description of Artificial Sequence: Synthetic oligonucleotide
atattccctgagtaaagagcgt

SEQ ID NO: 6004 - DNA, 22 bp, Artificial Sequence
  Description of Artificial Sequence: Synthetic oligonucleotide
ttcttaacagaagttctttggg

SEQ ID NO: 6005 - DNA, 22 bp, Artificial Sequence
  Description of Artificial Sequence: Synthetic oligonucleotide
ttaaattacaaactaagagcct

SEQ ID NO: 6006 - DNA, 22 bp, Artificial Sequence
  Description of Artificial Sequence: Synthetic oligonucleotide
taaggattcagcatttcatggc

SEQ ID NO: 6007 - DNA, 22 bp, Artificial Sequence
  Description of Artificial Sequence: Synthetic oligonucleotide
ttacacaagaactctctgtcct

SEQ ID NO: 6008 - DNA, 22 bp, Artificial Sequence
  Description of Artificial Sequence: Synthetic oligonucleotide
atcctaaacaaggtattgaggc

SEQ ID NO: 6009 - DNA, 22 bp, Artificial Sequence
  Description of Artificial Sequence: Synthetic oligonucleotide
atatcactggagatctccgcca

SEQ ID NO: 6010 - DNA, 22 bp, Artificial Sequence
  Description of Artificial Sequence: Synthetic oligonucleotide
taaactttcacatacatcacgg

SEQ ID NO: 6011 - DNA, 22 bp, Artificial Sequence
  Description of Artificial Sequence: Synthetic oligonucleotide
taaatgagagggcaaccgaggt

SEQ ID NO: 6012 - DNA, 22 bp, Artificial Sequence
  Description of Artificial Sequence: Synthetic oligonucleotide
ttaatgtctccgtagacctccg

SEQ ID NO: 6013 - DNA, 22 bp, Artificial Sequence
  Description of Artificial Sequence: Synthetic oligonucleotide
ttaattactctgtaactcagct

SEQ ID NO: 6014 - DNA, 22 bp, Artificial Sequence
  Description of Artificial Sequence: Synthetic oligonucleotide
tttaaagaagccattgtcaccc

SEQ ID NO: 6015 - DNA, 22 bp, Artificial Sequence
  Description of Artificial Sequence: Synthetic oligonucleotide
aataatctgaactatgtttggg

SEQ ID NO: 6016 - DNA, 22 bp, Artificial Sequence
  Description of Artificial Sequence: Synthetic oligonucleotide
tttaacatgacacttgtccggt

SEQ ID NO: 6017 - DNA, 22 bp, Artificial Sequence
  Description of Artificial Sequence: Synthetic oligonucleotide
tttcacactcacccttgaggcc

SEQ ID NO: 6018 - DNA, 22 bp, Artificial Sequence
  Description of Artificial Sequence: Synthetic oligonucleotide
aagaatcacaagtttaattcct

SEQ ID NO: 6019 - DNA, 22 bp, Artificial Sequence
  Description of Artificial Sequence: Synthetic oligonucleotide
atgtactaaatggctccctcgt

SEQ ID NO: 6020 - DNA, 22 bp, Artificial Sequence
  Description of Artificial Sequence: Synthetic oligonucleotide
attgacaatgacaggcactggc

SEQ ID NO: 6021 - DNA, 22 bp, Artificial Sequence
  Description of Artificial Sequence: Synthetic oligonucleotide
ttggaagaggagacgatggcct

SEQ ID NO: 6022 - DNA, 22 bp, Artificial Sequence
  Description of Artificial Sequence: Synthetic oligonucleotide
atctttctggataagctcacgc

SEQ ID NO: 6023 - DNA, 22 bp, Artificial Sequence
  Description of Artificial Sequence: Synthetic oligonucleotide
atccagcaggacgttgtctggc

SEQ ID NO: 6024 - DNA, 22 bp, Artificial Sequence
  Description of Artificial Sequence: Synthetic oligonucleotide
ttgttgtacggtgcaaaggcct

SEQ ID NO: 6025 - DNA, 22 bp, Artificial Sequence
  Description of Artificial Sequence: Synthetic oligonucleotide
attcaagttcattatctatgct

SEQ ID NO: 6026 - DNA, 22 bp, Artificial Sequence
  Description of Artificial Sequence: Synthetic oligonucleotide
taatacttcacaagtctctcca

SEQ ID NO: 6027 - DNA, 22 bp, Artificial Sequence
  Description of Artificial Sequence: Synthetic oligonucleotide
tatagcattcagattcaaaccc

SEQ ID NO: 6028 - DNA, 22 bp, Artificial Sequence
  Description of Artificial Sequence: Synthetic oligonucleotide
tagtccatcacaaggtacaggt

SEQ ID NO: 6029 - DNA, 22 bp, Artificial Sequence
  Description of Artificial Sequence: Synthetic oligonucleotide
aatgattaaggcagaaactggc

SEQ ID NO: 6030 - DNA, 22 bp, Artificial Sequence
  Description of Artificial Sequence: Synthetic oligonucleotide
tattcatatcactgaaagtgct

SEQ ID NO: 6031 - DNA, 22 bp, Artificial Sequence
  Description of Artificial Sequence: Synthetic oligonucleotide
ataggtacaaccatagtaagct

SEQ ID NO: 6032 - DNA, 22 bp, Artificial Sequence
  Description of Artificial Sequence: Synthetic oligonucleotide
ttgataaggacattggagggct

SEQ ID NO: 6033 - DNA, 22 bp, Artificial Sequence
  Description of Artificial Sequence: Synthetic oligonucleotide
ttcttgatccaggcaatctgcc

SEQ ID NO: 6034 - DNA, 22 bp, Artificial Sequence
  Description of Artificial Sequence: Synthetic oligonucleotide
ataacacaagccaataccagct

SEQ ID NO: 6035 - DNA, 22 bp, Artificial Sequence
  Description of Artificial Sequence: Synthetic oligonucleotide
attattgtgcatcttgcaggtg

SEQ ID NO: 6036 - DNA, 22 bp, Artificial Sequence
  Description of Artificial Sequence: Synthetic oligonucleotide
taataagtgcatcccaactgtg

SEQ ID NO: 6037 - DNA, 22 bp, Artificial Sequence
  Description of Artificial Sequence: Synthetic oligonucleotide
ttataatttaaggcactgagca

SEQ ID NO: 6038 - DNA, 22 bp, Artificial Sequence
  Description of Artificial Sequence: Synthetic oligonucleotide
ttacgttctcagtaatacatat

SEQ ID NO: 6039 - DNA, 22 bp, Artificial Sequence
  Description of Artificial Sequence: Synthetic oligonucleotide
atgaatgataatgatttgtcag

SEQ ID NO: 6040 - DNA, 22 bp, Artificial Sequence
  Description of Artificial Sequence: Synthetic oligonucleotide
atctgcttgcagaggctcaggt

SEQ ID NO: 6041 - DNA, 22 bp, Artificial Sequence
  Description of Artificial Sequence: Synthetic oligonucleotide
atctatatagcaataataggtg

SEQ ID NO: 6042 - DNA, 22 bp, Artificial Sequence
  Description of Artificial Sequence: Synthetic oligonucleotide
tataataaagagataatacgca

SEQ ID NO: 6043 - DNA, 22 bp, Artificial Sequence
  Description of Artificial Sequence: Synthetic oligonucleotide
aatctctgaagaaacaggtcct

SEQ ID NO: 6044 - DNA, 22 bp, Artificial Sequence
  Description of Artificial Sequence: Synthetic oligonucleotide
ttaataaactgataataggcct

SEQ ID NO: 6045 - DNA, 22 bp, Artificial Sequence
  Description of Artificial Sequence: Synthetic oligonucleotide
aatcaatgtcatcttgtggcga

SEQ ID NO: 6046 - DNA, 22 bp, Artificial Sequence
  Description of Artificial Sequence: Synthetic oligonucleotide
tgttacaaagatattcttggtc

SEQ ID NO: 6047 - DNA, 22 bp, Artificial Sequence
  Description of Artificial Sequence: Synthetic oligonucleotide
tacataaatggctccagtgcct

SEQ ID NO: 6048 - DNA, 22 bp, Artificial Sequence
  Description of Artificial Sequence: Synthetic oligonucleotide
taaaggtattaatctttcgcct

SEQ ID NO: 6049 - DNA, 22 bp, Artificial Sequence
  Description of Artificial Sequence: Synthetic oligonucleotide
ttatacttaaagctattctcga

SEQ ID NO: 6050 - DNA, 22 bp, Artificial Sequence
  Description of Artificial Sequence: Synthetic oligonucleotide
atatgggaagtggttctctgtg

SEQ ID NO: 6051 - DNA, 22 bp, Artificial Sequence
  Description of Artificial Sequence: Synthetic oligonucleotide
ataaagcaatctaatcttggtc

SEQ ID NO: 6052 - DNA, 22 bp, Artificial Sequence
  Description of Artificial Sequence: Synthetic oligonucleotide
taaagaagtattataatctcct

SEQ ID NO: 6053 - DNA, 22 bp, Artificial Sequence
  Description of Artificial Sequence: Synthetic oligonucleotide
atttgaagagatttgggacctg

SEQ ID NO: 6054 - DNA, 22 bp, Artificial Sequence
  Description of Artificial Sequence: Synthetic oligonucleotide
taaacacttgtgttaaccaggt

SEQ ID NO: 6055 - DNA, 22 bp, Artificial Sequence
  Description of Artificial Sequence: Synthetic oligonucleotide
taaagatatcttgtactctcct

SEQ ID NO: 6056 - DNA, 22 bp, Artificial Sequence
  Description of Artificial Sequence: Synthetic oligonucleotide
attgcttatgactttataagta

SEQ ID NO: 6057 - DNA, 22 bp, Artificial Sequence
  Description of Artificial Sequence: Synthetic oligonucleotide
taagagctacatgttgcaagaa

SEQ ID NO: 6058 - DNA, 22 bp, Artificial Sequence
  Description of Artificial Sequence: Synthetic oligonucleotide
tatagtcaagattcaacaggtc

SEQ ID NO: 6059 - DNA, 22 bp, Artificial Sequence
  Description of Artificial Sequence: Synthetic oligonucleotide
tttgaacatcatcatcattgga

SEQ ID NO: 6060 - DNA, 22 bp, Artificial Sequence
  Description of Artificial Sequence: Synthetic oligonucleotide
ttctgctgagacatgtatggct

SEQ ID NO: 6061 - DNA, 22 bp, Artificial Sequence
  Description of Artificial Sequence: Synthetic oligonucleotide
tattcgtatcagagaggcacca

SEQ ID NO: 6062 - DNA, 22 bp, Artificial Sequence
  Description of Artificial Sequence: Synthetic oligonucleotide
atggatgaacagatgcactgtc

SEQ ID NO: 6063 - DNA, 22 bp, Artificial Sequence
  Description of Artificial Sequence: Synthetic oligonucleotide
tttcatagctgcatagcagccg

SEQ ID NO: 6064 - DNA, 22 bp, Artificial Sequence
  Description of Artificial Sequence: Synthetic oligonucleotide
taattctaacagactatatcta

SEQ ID NO: 6065 - DNA, 22 bp, Artificial Sequence
  Description of Artificial Sequence: Synthetic oligonucleotide
attggtcatcagatacacagta

SEQ ID NO: 6066 - DNA, 22 bp, Artificial Sequence
  Description of Artificial Sequence: Synthetic oligonucleotide
ttctttcaggatatgctcagct

SEQ ID NO: 6067 - DNA, 22 bp, Artificial Sequence
  Description of Artificial Sequence: Synthetic oligonucleotide
ataatgatccacttaattagag

SEQ ID NO: 6068 - DNA, 22 bp, Artificial Sequence
  Description of Artificial Sequence: Synthetic oligonucleotide
atatcaggagacagaatgtccc

SEQ ID NO: 6069 - DNA, 22 bp, Artificial Sequence
  Description of Artificial Sequence: Synthetic oligonucleotide
tttctggataaatttgcgtcca

SEQ ID NO: 6070 - DNA, 22 bp, Artificial Sequence
  Description of Artificial Sequence: Synthetic oligonucleotide
cttacgaacacatttattgcct

SEQ ID NO: 6071 - DNA, 22 bp, Artificial Sequence
  Description of Artificial Sequence: Synthetic oligonucleotide
ttcaaacatggcacaaagggct

SEQ ID NO: 6072 - DNA, 22 bp, Artificial Sequence
  Description of Artificial Sequence: Synthetic oligonucleotide
ttataccttgcctgaaggtcct

SEQ ID NO: 6073 - DNA, 22 bp, Artificial Sequence
  Description of Artificial Sequence: Synthetic oligonucleotide
taaagctctaaatttaggtggg

SEQ ID NO: 6074 - DNA, 22 bp, Artificial Sequence
  Description of Artificial Sequence: Synthetic oligonucleotide
aattcgatggagaggctgacaa

SEQ ID NO: 6075 - DNA, 22 bp, Artificial Sequence
  Description of Artificial Sequence: Synthetic oligonucleotide
atactgatggcttctgaaaggg

SEQ ID NO: 6076 - DNA, 22 bp, Artificial Sequence
  Description of Artificial Sequence: Synthetic oligonucleotide
ttactcttgcccataagcacac

SEQ ID NO: 6077 - DNA, 22 bp, Artificial Sequence
  Description of Artificial Sequence: Synthetic oligonucleotide
taagatgctaacagcatgtgcc

SEQ ID NO: 6078 - DNA, 22 bp, Artificial Sequence
  Description of Artificial Sequence: Synthetic oligonucleotide
atgagtgacagtcatgatcggg

SEQ ID NO: 6079 - DNA, 22 bp, Artificial Sequence
  Description of Artificial Sequence: Synthetic oligonucleotide
ttaaactttgccaataattgta

SEQ ID NO: 6080 - DNA, 22 bp, Artificial Sequence
  Description of Artificial Sequence: Synthetic oligonucleotide
tgaagtcatcaagccattgggc

SEQ ID NO: 6081 - DNA, 22 bp, Artificial Sequence
  Description of Artificial Sequence: Synthetic oligonucleotide
tttaataagtgcatcccaactg

SEQ ID NO: 6082 - DNA, 22 bp, Artificial Sequence
  Description of Artificial Sequence: Synthetic oligonucleotide
taacaataaggttgtagtcctc

SEQ ID NO: 6083 - DNA, 22 bp, Artificial Sequence
  Description of Artificial Sequence: Synthetic oligonucleotide
ttacaacttctcagctgctgca

SEQ ID NO: 6084 - DNA, 22 bp, Artificial Sequence
  Description of Artificial Sequence: Synthetic oligonucleotide
tttctgaatgcatctaaggcac

SEQ ID NO: 6085 - DNA, 22 bp, Artificial Sequence
  Description of Artificial Sequence: Synthetic oligonucleotide
ataaagattgacaaattccttc

SEQ ID NO: 6086 - DNA, 22 bp, Artificial Sequence
  Description of Artificial Sequence: Synthetic oligonucleotide
taaacataacaaatccttccgt

SEQ ID NO: 6087 - DNA, 22 bp, Artificial Sequence
  Description of Artificial Sequence: Synthetic oligonucleotide
aattgtcatcaaatgacatgct

SEQ ID NO: 6088 - DNA, 22 bp, Artificial Sequence
  Description of Artificial Sequence: Synthetic oligonucleotide
gttacatatcacgtacatccca

SEQ ID NO: 6089 - DNA, 22 bp, Artificial Sequence
  Description of Artificial Sequence: Synthetic oligonucleotide
agaagttctgacacaaggcctc

SEQ ID NO: 6090 - DNA, 22 bp, Artificial Sequence
  Description of Artificial Sequence: Synthetic oligonucleotide
ttaaagtgaaacgttccatggg

SEQ ID NO: 6091 - DNA, 22 bp, Artificial Sequence
  Description of Artificial Sequence: Synthetic oligonucleotide
taatatggtcattgagccagct

SEQ ID NO: 6092 - DNA, 22 bp, Artificial Sequence
  Description of Artificial Sequence: Synthetic oligonucleotide
tcaatatagcatttaagcagtc

SEQ ID NO: 6093 - DNA, 22 bp, Artificial Sequence
  Description of Artificial Sequence: Synthetic oligonucleotide
tttgtggttaacttattctctt

SEQ ID NO: 6094 - DNA, 22 bp, Artificial Sequence
  Description of Artificial Sequence: Synthetic oligonucleotide
aataaattccaagcaaatggtg

SEQ ID NO: 6095 - DNA, 22 bp, Artificial Sequence
  Description of Artificial Sequence: Synthetic oligonucleotide
aatagttaataaattataggca

SEQ ID NO: 6096 - DNA, 22 bp, Artificial Sequence
  Description of Artificial Sequence: Synthetic oligonucleotide
ttcaacttcaatattctttgct

SEQ ID NO: 6097 - DNA, 22 bp, Artificial Sequence
  Description of Artificial Sequence: Synthetic oligonucleotide
atagaccttaggttgactacgg

SEQ ID NO: 6098 - DNA, 22 bp, Artificial Sequence
  Description of Artificial Sequence: Synthetic oligonucleotide
ataaactgataataggcctctt

SEQ ID NO: 6099 - DNA, 22 bp, Artificial Sequence
  Description of Artificial Sequence: Synthetic oligonucleotide
taattccatgcccttgttaggc

SEQ ID NO: 6100 - DNA, 22 bp, Artificial Sequence
  Description of Artificial Sequence: Synthetic oligonucleotide
atatctgaacacagaaccctaa

SEQ ID NO: 6101 - DNA, 22 bp, Artificial Sequence
  Description of Artificial Sequence: Synthetic oligonucleotide
attacaagagacaacttcgcca

SEQ ID NO: 6102 - DNA, 22 bp, Artificial Sequence
  Description of Artificial Sequence: Synthetic oligonucleotide
tatcctgaccagttactatcca

SEQ ID NO: 6103 - DNA, 22 bp, Artificial Sequence
  Description of Artificial Sequence: Synthetic oligonucleotide
ttctgaaaccatttgacaacca

SEQ ID NO: 6104 - DNA, 22 bp, Artificial Sequence
  Description of Artificial Sequence: Synthetic oligonucleotide
tttagttatgggaagaatactc

SEQ ID NO: 6105 - DNA, 22 bp, Artificial Sequence
  Description of Artificial Sequence: Synthetic oligonucleotide
tattaggaaggagatgtcagtg

SEQ ID NO: 6106 - DNA, 22 bp, Artificial Sequence
  Description of Artificial Sequence: Synthetic oligonucleotide
gaatatgtccacttcagaagca

SEQ ID NO: 6107 - DNA, 22 bp, Artificial Sequence
  Description of Artificial Sequence: Synthetic oligonucleotide
ctatatagcaataataggtgca

SEQ ID NO: 6108 - DNA, 22 bp, Artificial Sequence
  Description of Artificial Sequence: Synthetic oligonucleotide
atagtcaataactaaggaaggc

SEQ ID NO: 6109 - DNA, 22 bp, Artificial Sequence
  Description of Artificial Sequence: Synthetic oligonucleotide
tttggaactaaccttctgagct

SEQ ID NO: 6110 - DNA, 22 bp, Artificial Sequence
  Description of Artificial Sequence: Synthetic oligonucleotide
ttctcatctgacattctagcga

SEQ ID NO: 6111 - DNA, 22 bp, Artificial Sequence
  Description of Artificial Sequence: Synthetic oligonucleotide
taacatgatgacatgtgtggct

SEQ ID NO: 6112 - DNA, 22 bp, Artificial Sequence
  Description of Artificial Sequence: Synthetic oligonucleotide
aatataaatacacacgtgtggt

SEQ ID NO: 6113 - DNA, 22 bp, Artificial Sequence
  Description of Artificial Sequence: Synthetic oligonucleotide
gaacttcgaaataatgatcgcc

SEQ ID NO: 6114 - DNA, 22 bp, Artificial Sequence
  Description of Artificial Sequence: Synthetic oligonucleotide
atttctgaaaggccaaattcca

SEQ ID NO: 6115 - DNA, 22 bp, Artificial Sequence
  Description of Artificial Sequence: Synthetic oligonucleotide
tattattgactttaagtcagct

SEQ ID NO: 6116 - DNA, 22 bp, Artificial Sequence
  Description of Artificial Sequence: Synthetic oligonucleotide
agattatcagagaggatcaggc

SEQ ID NO: 6117 - DNA, 22 bp, Artificial Sequence
  Description of Artificial Sequence: Synthetic oligonucleotide
tctttgaatccttagctgtgac

SEQ ID NO: 6118 - DNA, 22 bp, Artificial Sequence
  Description of Artificial Sequence: Synthetic oligonucleotide
ttatcttcgaaagtcacgaggc

SEQ ID NO: 6119 - DNA, 22 bp, Artificial Sequence
  Description of Artificial Sequence: Synthetic oligonucleotide
gtatgtccttccataggaccca

SEQ ID NO: 6120 - DNA, 22 bp, Artificial Sequence
  Description of Artificial Sequence: Synthetic oligonucleotide
ataggagtcccgagtccctgga

SEQ ID NO: 6121 - DNA, 22 bp, Artificial Sequence
  Description of Artificial Sequence: Synthetic oligonucleotide
tttaataatattcatatgtcca

SEQ ID NO: 6122 - DNA, 22 bp, Artificial Sequence
  Description of Artificial Sequence: Synthetic oligonucleotide
atgacttcccaaattacacgtc

SEQ ID NO: 6123 - DNA, 22 bp, Artificial Sequence
  Description of Artificial Sequence: Synthetic oligonucleotide
atcaactctaactttagccctt

SEQ ID NO: 6124 - DNA, 22 bp, Artificial Sequence
  Description of Artificial Sequence: Synthetic oligonucleotide
tatttgtccgattcacctgggc

SEQ ID NO: 6125 - DNA, 22 bp, Artificial Sequence
  Description of Artificial Sequence: Synthetic oligonucleotide
ttcactcacaacatcaattcga

SEQ ID NO: 6126 - DNA, 22 bp, Artificial Sequence
  Description of Artificial Sequence: Synthetic oligonucleotide
atataaattcaataatactgcc

SEQ ID NO: 6127 - DNA, 22 bp, Artificial Sequence
  Description of Artificial Sequence: Synthetic oligonucleotide
ttcagtgtggagcacagcatct

SEQ ID NO: 6128 - DNA, 22 bp, Artificial Sequence
  Description of Artificial Sequence: Synthetic oligonucleotide
agttgaaatcaaagtcatcctg

SEQ ID NO: 6129 - DNA, 22 bp, Artificial Sequence
  Description of Artificial Sequence: Synthetic oligonucleotide
tatgttccagacactaaatcga

SEQ ID NO: 6130 - DNA, 22 bp, Artificial Sequence
  Description of Artificial Sequence: Synthetic oligonucleotide
atcaattagcatcctcagggtc

SEQ ID NO: 6131 - DNA, 22 bp, Artificial Sequence
  Description of Artificial Sequence: Synthetic oligonucleotide
atatccattgaaatcttcacca

SEQ ID NO: 6132 - DNA, 22 bp, Artificial Sequence
  Description of Artificial Sequence: Synthetic oligonucleotide
ttatcttgagtgaagatgtgct

SEQ ID NO: 6133 - DNA, 22 bp, Artificial Sequence
  Description of Artificial Sequence: Synthetic oligonucleotide
tatttgtatcgatacatgcccg

SEQ ID NO: 6134 - DNA, 22 bp, Artificial Sequence
  Description of Artificial Sequence: Synthetic oligonucleotide
gtttctttcatgtcaggaaggt

SEQ ID NO: 6135 - DNA, 22 bp, Artificial Sequence
  Description of Artificial Sequence: Synthetic oligonucleotide
atttaatatatcttgataactg

SEQ ID NO: 6136 - DNA, 22 bp, Artificial Sequence
  Description of Artificial Sequence: Synthetic oligonucleotide
tttctcaacaatatatttagac

SEQ ID NO: 6137 - DNA, 22 bp, Artificial Sequence
  Description of Artificial Sequence: Synthetic oligonucleotide
ttcttatatactgttagctgct

SEQ ID NO: 6138 - DNA, 22 bp, Artificial Sequence
  Description of Artificial Sequence: Synthetic oligonucleotide
aatacaaaggaaattaactctg

SEQ ID NO: 6139 - DNA, 22 bp, Artificial Sequence
  Description of Artificial Sequence: Synthetic oligonucleotide
attaaataagccataggactct

SEQ ID NO: 6140 - DNA, 22 bp, Artificial Sequence
  Description of Artificial Sequence: Synthetic oligonucleotide
ataatctacatatctaagtgct

SEQ ID NO: 6141 - DNA, 22 bp, Artificial Sequence
  Description of Artificial Sequence: Synthetic oligonucleotide
ttagggatagacttgatatcct

SEQ ID NO: 6142 - DNA, 22 bp, Artificial Sequence
  Description of Artificial Sequence: Synthetic oligonucleotide
agattcctgaacaaactgcctg

SEQ ID NO: 6143 - DNA, 22 bp, Artificial Sequence
  Description of Artificial Sequence: Synthetic oligonucleotide
attatagtacatattagctcga

SEQ ID NO: 6144 - DNA, 22 bp, Artificial Sequence
  Description of Artificial Sequence: Synthetic oligonucleotide
cttaacgtaatcatgcagccgg

SEQ ID NO: 6145 - DNA, 22 bp, Artificial Sequence
  Description of Artificial Sequence: Synthetic oligonucleotide
tatatgtattagtattctggct

SEQ ID NO: 6146 - DNA, 22 bp, Artificial Sequence
  Description of Artificial Sequence: Synthetic oligonucleotide
tttccaaataacatatgtggtg

SEQ ID NO: 6147 - DNA, 22 bp, Artificial Sequence
  Description of Artificial Sequence: Synthetic oligonucleotide
atccaatatgtttcaagccctt

SEQ ID NO: 6148 - DNA, 22 bp, Artificial Sequence
  Description of Artificial Sequence: Synthetic oligonucleotide
taatgagatacattggactctt

SEQ ID NO: 6149 - DNA, 22 bp, Artificial Sequence
  Description of Artificial Sequence: Synthetic oligonucleotide
attccattgaactcaaacagga

SEQ ID NO: 6150 - DNA, 22 bp, Artificial Sequence
  Description of Artificial Sequence: Synthetic oligonucleotide
ttagcatttcctataagagccc

SEQ ID NO: 6151 - DNA, 22 bp, Artificial Sequence
  Description of Artificial Sequence: Synthetic oligonucleotide
tttgtttctacgtttcttctga

SEQ ID NO: 6152 - DNA, 22 bp, Artificial Sequence
  Description of Artificial Sequence: Synthetic oligonucleotide
tttctaatagagacccaatgct

SEQ ID NO: 6153 - DNA, 22 bp, Artificial Sequence
  Description of Artificial Sequence: Synthetic oligonucleotide
attggaaactaaagacttaggc

SEQ ID NO: 6154 - DNA, 22 bp, Artificial Sequence
  Description of Artificial Sequence: Synthetic oligonucleotide
tttatctaccaaatacatggaa

SEQ ID NO: 6155 - DNA, 22 bp, Artificial Sequence
  Description of Artificial Sequence: Synthetic oligonucleotide
ttgtttgaacagttatggtggt

SEQ ID NO: 6156 - DNA, 22 bp, Artificial Sequence
  Description of Artificial Sequence: Synthetic oligonucleotide
aataccttggagctgatagtgt

SEQ ID NO: 6157 - DNA, 22 bp, Artificial Sequence
  Description of Artificial Sequence: Synthetic oligonucleotide
tttgtctaacagttcaactgct

SEQ ID NO: 6158 - DNA, 22 bp, Artificial Sequence
  Description of Artificial Sequence: Synthetic oligonucleotide
tttgacattaagaagagagccc

SEQ ID NO: 6159 - DNA, 22 bp, Artificial Sequence
  Description of Artificial Sequence: Synthetic oligonucleotide
ttcactatacagagcatcttct

SEQ ID NO: 6160 - DNA, 22 bp, Artificial Sequence
  Description of Artificial Sequence: Synthetic oligonucleotide
tttctgtatcatgtgctatcca

SEQ ID NO: 6161 - DNA, 22 bp, Artificial Sequence
  Description of Artificial Sequence: Synthetic oligonucleotide
ttatcataatccagaaacaccc

SEQ ID NO: 6162 - DNA, 22 bp, Artificial Sequence
  Description of Artificial Sequence: Synthetic oligonucleotide
tttaggaatgtgctgaggagct

SEQ ID NO: 6163 - DNA, 22 bp, Artificial Sequence
  Description of Artificial Sequence: Synthetic oligonucleotide
tttaacagggtcaaatattcct

SEQ ID NO: 6164 - DNA, 22 bp, Artificial Sequence
  Description of Artificial Sequence: Synthetic oligonucleotide
ttatgagcagacaggaactgcc

SEQ ID NO: 6165 - DNA, 22 bp, Artificial Sequence
  Description of Artificial Sequence: Synthetic oligonucleotide
taaatactttccatttgacccg

SEQ ID NO: 6166 - DNA, 22 bp, Artificial Sequence
  Description of Artificial Sequence: Synthetic oligonucleotide
ttgtaccttgaactgatttccc

SEQ ID NO: 6167 - DNA, 22 bp, Artificial Sequence
  Description of Artificial Sequence: Synthetic oligonucleotide
tttatcttcagttatgaatgct

SEQ ID NO: 6168 - DNA, 22 bp, Artificial Sequence
  Description of Artificial Sequence: Synthetic oligonucleotide
aattctcttgtcttaccaaggg

SEQ ID NO: 6169 - DNA, 22 bp, Artificial Sequence
  Description of Artificial Sequence: Synthetic oligonucleotide
ttcttactggagactgagagcg

SEQ ID NO: 6170 - DNA, 22 bp, Artificial Sequence
  Description of Artificial Sequence: Synthetic oligonucleotide
ttgatttgtcaatctgaggcct

SEQ ID NO: 6171 - DNA, 22 bp, Artificial Sequence
  Description of Artificial Sequence: Synthetic oligonucleotide
ttcacgtaacacatacagggca

SEQ ID NO: 6172 - DNA, 22 bp, Artificial Sequence
  Description of Artificial Sequence: Synthetic oligonucleotide
tttcctgaggattgtaacgttc

SEQ ID NO: 6173 - DNA, 22 bp, Artificial Sequence
  Description of Artificial Sequence: Synthetic oligonucleotide
gttattgtaaatagccagaccc

SEQ ID NO: 6174 - DNA, 22 bp, Artificial Sequence
  Description of Artificial Sequence: Synthetic oligonucleotide
ttcaacaaagcagtacaagcct

SEQ ID NO: 6175 - DNA, 22 bp, Artificial Sequence
  Description of Artificial Sequence: Synthetic oligonucleotide
ttcatttctctttcataatggg

SEQ ID NO: 6176 - DNA, 22 bp, Artificial Sequence
  Description of Artificial Sequence: Synthetic oligonucleotide
ttgcttcgtcaaatacattctt

SEQ ID NO: 6177 - DNA, 22 bp, Artificial Sequence
  Description of Artificial Sequence: Synthetic oligonucleotide
atagtgaaggtcaatgttccgg

SEQ ID NO: 6178 - DNA, 22 bp, Artificial Sequence
  Description of Artificial Sequence: Synthetic oligonucleotide
atgaagcaagaactgatttgtg

SEQ ID NO: 6179 - DNA, 22 bp, Artificial Sequence
  Description of Artificial Sequence: Synthetic oligonucleotide
atttggttcaactttagagtat

SEQ ID NO: 6180 - DNA, 22 bp, Artificial Sequence
  Description of Artificial Sequence: Synthetic oligonucleotide
aataagatgtacattgagcttg

SEQ ID NO: 6181 - DNA, 22 bp, Artificial Sequence
  Description of Artificial Sequence: Synthetic oligonucleotide
ttcttctagggatttctgtggt

SEQ ID NO: 6182 - DNA, 22 bp, Artificial Sequence
  Description of Artificial Sequence: Synthetic oligonucleotide
tttcctcttaacatacgcagga

SEQ ID NO: 6183 - DNA, 22 bp, Artificial Sequence
  Description of Artificial Sequence: Synthetic oligonucleotide
tacttcaatcctcttgtgtggg

SEQ ID NO: 6184 - DNA, 22 bp, Artificial Sequence
  Description of Artificial Sequence: Synthetic oligonucleotide
aattatataggctgtaccagct

SEQ ID NO: 6185 - DNA, 22 bp, Artificial Sequence
  Description of Artificial Sequence: Synthetic oligonucleotide
tacctgtatcaaatatgcacca

SEQ ID NO: 6186 - DNA, 22 bp, Artificial Sequence
  Description of Artificial Sequence: Synthetic oligonucleotide
aatgactcaactctgaagtgcg

SEQ ID NO: 6187 - DNA, 22 bp, Artificial Sequence
  Description of Artificial Sequence: Synthetic oligonucleotide
tattggaaagtggatgagagag

SEQ ID NO: 6188 - DNA, 22 bp, Artificial Sequence
  Description of Artificial Sequence: Synthetic oligonucleotide
atatatcatggtttacttggcg

SEQ ID NO: 6189 - DNA, 22 bp, Artificial Sequence
  Description of Artificial Sequence: Synthetic oligonucleotide
tttcttcagacatattctgcct

SEQ ID NO: 6190 - DNA, 22 bp, Artificial Sequence
  Description of Artificial Sequence: Synthetic oligonucleotide
tatattaaatgtagatgcaccc

SEQ ID NO: 6191 - DNA, 22 bp, Artificial Sequence
  Description of Artificial Sequence: Synthetic oligonucleotide
taatttctggagccctgtacca

SEQ ID NO: 6192 - DNA, 22 bp, Artificial Sequence
  Description of Artificial Sequence: Synthetic oligonucleotide
tatactatagattccaaggccc

SEQ ID NO: 6193 - DNA, 22 bp, Artificial Sequence
  Description of Artificial Sequence: Synthetic oligonucleotide
ttagttcttgcctggatgtggg

SEQ ID NO: 6194 - DNA, 22 bp, Artificial Sequence
  Description of Artificial Sequence: Synthetic oligonucleotide
attcaaatagcaagtcattgct

SEQ ID NO: 6195 - DNA, 22 bp, Artificial Sequence
  Description of Artificial Sequence: Synthetic oligonucleotide
attctatttgatgcaatgtcca

SEQ ID NO: 6196 - DNA, 22 bp, Artificial Sequence
  Description of Artificial Sequence: Synthetic oligonucleotide
atttgatgccagttcagttccc

SEQ ID NO: 6197 - DNA, 22 bp, Artificial Sequence
  Description of Artificial Sequence: Synthetic oligonucleotide
tatttcttgcaggacaaacggc

SEQ ID NO: 6198 - DNA, 22 bp, Artificial Sequence
  Description of Artificial Sequence: Synthetic oligonucleotide
ataatgaataagcttcgtccct

SEQ ID NO: 6199 - DNA, 22 bp, Artificial Sequence
  Description of Artificial Sequence: Synthetic oligonucleotide
atttattagctccttctttggc

SEQ ID NO: 6200 - DNA, 22 bp, Artificial Sequence
  Description of Artificial Sequence: Synthetic oligonucleotide
atagaatacacgtgagctgggc

SEQ ID NO: 6201 - DNA, 22 bp, Artificial Sequence
  Description of Artificial Sequence: Synthetic oligonucleotide
ttacgcaagaaacaaggaggct

SEQ ID NO: 6202 - DNA, 22 bp, Artificial Sequence
  Description of Artificial Sequence: Synthetic oligonucleotide
taacatactgacagcctatccc

SEQ ID NO: 6203 - DNA, 22 bp, Artificial Sequence
  Description of Artificial Sequence: Synthetic oligonucleotide
atatttatagcatttaacccgg

SEQ ID NO: 6204 - DNA, 22 bp, Artificial Sequence
  Description of Artificial Sequence: Synthetic oligonucleotide
attcttcttccagttgcttggg

SEQ ID NO: 6205 - DNA, 22 bp, Artificial Sequence
  Description of Artificial Sequence: Synthetic oligonucleotide
taaataaacagtcagaagggcc

SEQ ID NO: 6206 - DNA, 22 bp, Artificial Sequence
  Description of Artificial Sequence: Synthetic oligonucleotide
attaagatagcaagtattgccg

SEQ ID NO: 6207 - DNA, 22 bp, Artificial Sequence
  Description of Artificial Sequence: Synthetic oligonucleotide
ttatttaattaaaggccttgca

SEQ ID NO: 6208 - DNA, 22 bp, Artificial Sequence
  Description of Artificial Sequence: Synthetic oligonucleotide
taagcttagcattctatatgga

SEQ ID NO: 6209 - DNA, 22 bp, Artificial Sequence
  Description of Artificial Sequence: Synthetic oligonucleotide
attgcttatatcaagtgcaggt

SEQ ID NO: 6210 - DNA, 22 bp, Artificial Sequence
  Description of Artificial Sequence: Synthetic oligonucleotide
tattctgttctcagaaattgcg

SEQ ID NO: 6211 - DNA, 22 bp, Artificial Sequence
  Description of Artificial Sequence: Synthetic oligonucleotide
taattgccacatttgttaacat

SEQ ID NO: 6212 - DNA, 22 bp, Artificial Sequence
  Description of Artificial Sequence: Synthetic oligonucleotide
ttataggaacctcatttcactt

SEQ ID NO: 6213 - DNA, 22 bp, Artificial Sequence
  Description of Artificial Sequence: Synthetic oligonucleotide
attatctttgaggatgtatcct

SEQ ID NO: 6214 - DNA, 22 bp, Artificial Sequence
  Description of Artificial Sequence: Synthetic oligonucleotide
ttaatatttgaatcctctcccg

SEQ ID NO: 6215 - DNA, 22 bp, Artificial Sequence
  Description of Artificial Sequence: Synthetic oligonucleotide
ataaactatagagccaactgct

SEQ ID NO: 6216 - DNA, 22 bp, Artificial Sequence
  Description of Artificial Sequence: Synthetic oligonucleotide
tttatttacctcagtcttggct

SEQ ID NO: 6217 - DNA, 22 bp, Artificial Sequence
  Description of Artificial Sequence: Synthetic oligonucleotide
ttgttctatggctgaaatccct

SEQ ID NO: 6218 - DNA, 22 bp, Artificial Sequence
  Description of Artificial Sequence: Synthetic oligonucleotide
atattcttgaacctgttctgca

SEQ ID NO: 6219 - DNA, 22 bp, Artificial Sequence
  Description of Artificial Sequence: Synthetic oligonucleotide
ttacgtagggatctgacaggcc

SEQ ID NO: 6220 - DNA, 22 bp, Artificial Sequence
  Description of Artificial Sequence: Synthetic oligonucleotide
atgcattaagagtaataccggg

SEQ ID NO: 6221 - DNA, 22 bp, Artificial Sequence
  Description of Artificial Sequence: Synthetic oligonucleotide
aataatgaataagcttcgtccc

SEQ ID NO: 6222 - DNA, 22 bp, Artificial Sequence
  Description of Artificial Sequence: Synthetic oligonucleotide
tttattgcttatatcaagtgca

SEQ ID NO: 6223 - DNA, 22 bp, Artificial Sequence
  Description of Artificial Sequence: Synthetic oligonucleotide
ttgtagatgtcatcaggcacct

SEQ ID NO: 6224 - DNA, 22 bp, Artificial Sequence
  Description of Artificial Sequence: Synthetic oligonucleotide
tactcatagccatctatatcca

SEQ ID NO: 6225 - DNA, 22 bp, Artificial Sequence
  Description of Artificial Sequence: Synthetic oligonucleotide
ttaatattaagctttcacggct

SEQ ID NO: 6226 - DNA, 22 bp, Artificial Sequence
  Description of Artificial Sequence: Synthetic oligonucleotide
ttcacatactttaggatgaccc

SEQ ID NO: 6227 - DNA, 22 bp, Artificial Sequence
  Description of Artificial Sequence: Synthetic oligonucleotide
ataattcaaagtattggcagga

SEQ ID NO: 6228 - DNA, 22 bp, Artificial Sequence
  Description of Artificial Sequence: Synthetic oligonucleotide
tatttgcaagcaatactctgcc

SEQ ID NO: 6229 - DNA, 22 bp, Artificial Sequence
  Description of Artificial Sequence: Synthetic oligonucleotide
ttctcatcgggtattaaacggc

SEQ ID NO: 6230 - DNA, 22 bp, Artificial Sequence
  Description of Artificial Sequence: Synthetic oligonucleotide
taatactcttaattagctccct

SEQ ID NO: 6231 - DNA, 22 bp, Artificial Sequence
  Description of Artificial Sequence: Synthetic oligonucleotide
tataccataaatatgtggtgcg

SEQ ID NO: 6232 - DNA, 22 bp, Artificial Sequence
  Description of Artificial Sequence: Synthetic oligonucleotide
ttcaagtttccctttgattgat

SEQ ID NO: 6233 - DNA, 22 bp, Artificial Sequence
  Description of Artificial Sequence: Synthetic oligonucleotide
caatattctcagagcacatgga

SEQ ID NO: 6234 - DNA, 22 bp, Artificial Sequence
  Description of Artificial Sequence: Synthetic oligonucleotide
tttacttagcaaactttatcct

SEQ ID NO: 6235 - DNA, 22 bp, Artificial Sequence
  Description of Artificial Sequence: Synthetic oligonucleotide
ttgtatttctccagtatcaggt

SEQ ID NO: 6236 - DNA, 22 bp, Artificial Sequence
  Description of Artificial Sequence: Synthetic oligonucleotide
tttgtagtccatagtatttcgt

SEQ ID NO: 6237 - DNA, 22 bp, Artificial Sequence
  Description of Artificial Sequence: Synthetic oligonucleotide
aattcaagagccaataaatgca

SEQ ID NO: 6238 - DNA, 22 bp, Artificial Sequence
  Description of Artificial Sequence: Synthetic oligonucleotide
ttcgtaataaaggcaaagacct

SEQ ID NO: 6239 - DNA, 22 bp, Artificial Sequence
  Description of Artificial Sequence: Synthetic oligonucleotide
ttgctacagccaaggctgaggt

SEQ ID NO: 6240 - DNA, 22 bp, Artificial Sequence
  Description of Artificial Sequence: Synthetic oligonucleotide
atatctaaacatattcttccca

SEQ ID NO: 6241 - DNA, 22 bp, Artificial Sequence
  Description of Artificial Sequence: Synthetic oligonucleotide
tttaccaatgctatacgtgccc

SEQ ID NO: 6242 - DNA, 22 bp, Artificial Sequence
  Description of Artificial Sequence: Synthetic oligonucleotide
atatgttccctggattcagcct

SEQ ID NO: 6243 - DNA, 22 bp, Artificial Sequence
  Description of Artificial Sequence: Synthetic oligonucleotide
taaagctgaaataaaggcaggt

SEQ ID NO: 6244 - DNA, 22 bp, Artificial Sequence
  Description of Artificial Sequence: Synthetic oligonucleotide
ttctgtaaagagctatacagcc

SEQ ID NO: 6245 - DNA, 22 bp, Artificial Sequence
  Description of Artificial Sequence: Synthetic oligonucleotide
atttcataagatgctaggccct

SEQ ID NO: 6246 - DNA, 22 bp, Artificial Sequence
  Description of Artificial Sequence: Synthetic oligonucleotide
attaatcaacacattgtcaccc

SEQ ID NO: 6247 - DNA, 22 bp, Artificial Sequence
  Description of Artificial Sequence: Synthetic oligonucleotide
ttctttaattaaactgagagca

SEQ ID NO: 6248 - DNA, 22 bp, Artificial Sequence
  Description of Artificial Sequence: Synthetic oligonucleotide
ttactgttaatgagagagtgca

SEQ ID NO: 6249 - DNA, 22 bp, Artificial Sequence
  Description of Artificial Sequence: Synthetic oligonucleotide
attcctgactgtagtgttggct

SEQ ID NO: 6250 - DNA, 22 bp, Artificial Sequence
  Description of Artificial Sequence: Synthetic oligonucleotide
ttaacaactgctttatacgcct

SEQ ID NO: 6251 - DNA, 22 bp, Artificial Sequence
  Description of Artificial Sequence: Synthetic oligonucleotide
ttaaatttacagactacaagca

SEQ ID NO: 6252 - DNA, 22 bp, Artificial Sequence
  Description of Artificial Sequence: Synthetic oligonucleotide
tttcagtatgaatgccttggcc

SEQ ID NO: 6253 - DNA, 22 bp, Artificial Sequence
  Description of Artificial Sequence: Synthetic oligonucleotide
tttcctgctgaatgagacacgt

SEQ ID NO: 6254 - DNA, 22 bp, Artificial Sequence
  Description of Artificial Sequence: Synthetic oligonucleotide
ttaacacgttgtatcatcacgc

SEQ ID NO: 6255 - DNA, 22 bp, Artificial Sequence
  Description of Artificial Sequence: Synthetic oligonucleotide
tttgaataacaatgtcaaggcc

SEQ ID NO: 6256 - DNA, 22 bp, Artificial Sequence
  Description of Artificial Sequence: Synthetic oligonucleotide
aatctttctcatttatagacct

SEQ ID NO: 6257 - DNA, 22 bp, Artificial Sequence
  Description of Artificial Sequence: Synthetic oligonucleotide
attaactcagttctgaaggcca

SEQ ID NO: 6258 - DNA, 22 bp, Artificial Sequence
  Description of Artificial Sequence: Synthetic oligonucleotide
attaagaattgtcatactcggg

SEQ ID NO: 6259 - DNA, 22 bp, Artificial Sequence
  Description of Artificial Sequence: Synthetic oligonucleotide
tatttcttctaccttagtaggt

SEQ ID NO: 6260 - DNA, 22 bp, Artificial Sequence
  Description of Artificial Sequence: Synthetic oligonucleotide
ttactttatgcttaaaggcgct

SEQ ID NO: 6261 - DNA, 22 bp, Artificial Sequence
  Description of Artificial Sequence: Synthetic oligonucleotide
ttaaggcttcaaatgcaaagga

SEQ ID NO: 6262 - DNA, 22 bp, Artificial Sequence
  Description of Artificial Sequence: Synthetic oligonucleotide
ctaacacatgagatagcagcca

SEQ ID NO: 6263 - DNA, 22 bp, Artificial Sequence
  Description of Artificial Sequence: Synthetic oligonucleotide
taatatttgtatattcgtgccc

SEQ ID NO: 6264 - DNA, 22 bp, Artificial Sequence
  Description of Artificial Sequence: Synthetic oligonucleotide
atgattagagagagacaccctt

SEQ ID NO: 6265 - DNA, 22 bp, Artificial Sequence
  Description of Artificial Sequence: Synthetic oligonucleotide
tatattaactgaatcagctggt

SEQ ID NO: 6266 - DNA, 22 bp, Artificial Sequence
  Description of Artificial Sequence: Synthetic oligonucleotide
tattcacacctaatgatgtggc

SEQ ID NO: 6267 - DNA, 22 bp, Artificial Sequence
  Description of Artificial Sequence: Synthetic oligonucleotide
ataaggtttagaaatgagtgct

SEQ ID NO: 6268 - DNA, 22 bp, Artificial Sequence
  Description of Artificial Sequence: Synthetic oligonucleotide
atccacctttgctttaatgccc

SEQ ID NO: 6269 - DNA, 22 bp, Artificial Sequence
  Description of Artificial Sequence: Synthetic oligonucleotide
aagaaagttcaagaatgaggct

SEQ ID NO: 6270 - DNA, 22 bp, Artificial Sequence
  Description of Artificial Sequence: Synthetic oligonucleotide
taggtatcactcaagaaggcgg

SEQ ID NO: 6271 - DNA, 22 bp, Artificial Sequence
  Description of Artificial Sequence: Synthetic oligonucleotide
ttcctaagccaatattcagcct

SEQ ID NO: 6272 - DNA, 22 bp, Artificial Sequence
  Description of Artificial Sequence: Synthetic oligonucleotide
ttcccagaccagtaaataagca

SEQ ID NO: 6273 - DNA, 22 bp, Artificial Sequence
  Description of Artificial Sequence: Synthetic oligonucleotide
atataatattgcctatacagga

SEQ ID NO: 6274 - DNA, 22 bp, Artificial Sequence
  Description of Artificial Sequence: Synthetic oligonucleotide
atatagttctccaggatggccc

SEQ ID NO: 6275 - DNA, 22 bp, Artificial Sequence
  Description of Artificial Sequence: Synthetic oligonucleotide
atagttggtgattaatagaggg

SEQ ID NO: 6276 - DNA, 22 bp, Artificial Sequence
  Description of Artificial Sequence: Synthetic oligonucleotide
tttcagaaagatcttcagtcca

SEQ ID NO: 6277 - DNA, 22 bp, Artificial Sequence
  Description of Artificial Sequence: Synthetic oligonucleotide
ataatttctcagttgcagtgca

SEQ ID NO: 6278 - DNA, 22 bp, Artificial Sequence
  Description of Artificial Sequence: Synthetic oligonucleotide
atagataaatcggtactgtgct

SEQ ID NO: 6279 - DNA, 22 bp, Artificial Sequence
  Description of Artificial Sequence: Synthetic oligonucleotide
ctggatgtgcagcttgtccggt

SEQ ID NO: 6280 - DNA, 22 bp, Artificial Sequence
  Description of Artificial Sequence: Synthetic oligonucleotide
ttattctctctagggaacaggc

SEQ ID NO: 6281 - DNA, 22 bp, Artificial Sequence
  Description of Artificial Sequence: Synthetic oligonucleotide
tatttaagtactactccctgct

SEQ ID NO: 6282 - DNA, 22 bp, Artificial Sequence
  Description of Artificial Sequence: Synthetic oligonucleotide
tttcactgtcccaatccatggc

SEQ ID NO: 6283 - DNA, 22 bp, Artificial Sequence
  Description of Artificial Sequence: Synthetic oligonucleotide
attatcagataaagttggtcca

SEQ ID NO: 6284 - DNA, 22 bp, Artificial Sequence
  Description of Artificial Sequence: Synthetic oligonucleotide
atgaaactgaggaagatgaggc

SEQ ID NO: 6285 - DNA, 22 bp, Artificial Sequence
  Description of Artificial Sequence: Synthetic oligonucleotide
tttcttcttaatgctgtttggg

SEQ ID NO: 6286 - DNA, 22 bp, Artificial Sequence
  Description of Artificial Sequence: Synthetic oligonucleotide
tagactacataatatacgtggg

SEQ ID NO: 6287 - DNA, 22 bp, Artificial Sequence
  Description of Artificial Sequence: Synthetic oligonucleotide
ttatgatgttcagggaactcct

SEQ ID NO: 6288 - DNA, 22 bp, Artificial Sequence
  Description of Artificial Sequence: Synthetic oligonucleotide
atcttatagggcaagataccct

SEQ ID NO: 6289 - DNA, 22 bp, Artificial Sequence
  Description of Artificial Sequence: Synthetic oligonucleotide
tattacgggtactaatatccct

SEQ ID NO: 6290 - DNA, 22 bp, Artificial Sequence
  Description of Artificial Sequence: Synthetic oligonucleotide
tatttgaacctgttgacctgga

SEQ ID NO: 6291 - DNA, 22 bp, Artificial Sequence
  Description of Artificial Sequence: Synthetic oligonucleotide
attaagatggaagagctggctt

SEQ ID NO: 6292 - DNA, 22 bp, Artificial Sequence
  Description of Artificial Sequence: Synthetic oligonucleotide
tttatcttgacctttaactgaa

SEQ ID NO: 6293 - DNA, 22 bp, Artificial Sequence
  Description of Artificial Sequence: Synthetic oligonucleotide
taaactaaggagcctggcactc

SEQ ID NO: 6294 - DNA, 22 bp, Artificial Sequence
  Description of Artificial Sequence: Synthetic oligonucleotide
ttgactgtttatcttatagggc

SEQ ID NO: 6295 - DNA, 22 bp, Artificial Sequence
  Description of Artificial Sequence: Synthetic oligonucleotide
ttaatactcttaattagctccc

SEQ ID NO: 6296 - DNA, 22 bp, Artificial Sequence
  Description of Artificial Sequence: Synthetic oligonucleotide
ttagatgaagagacaagttcct

SEQ ID NO: 6297 - DNA, 22 bp, Artificial Sequence
  Description of Artificial Sequence: Synthetic oligonucleotide
tttacactcaatcttcaggcgc

SEQ ID NO: 6298 - DNA, 22 bp, Artificial Sequence
  Description of Artificial Sequence: Synthetic oligonucleotide
atataccaagaatgagacagca

SEQ ID NO: 6299 - DNA, 22 bp, Artificial Sequence
  Description of Artificial Sequence: Synthetic oligonucleotide
taatatttgaatcctctcccgg

SEQ ID NO: 6300 - DNA, 22 bp, Artificial Sequence
  Description of Artificial Sequence: Synthetic oligonucleotide
aattataaacaaagcacaaggc

SEQ ID NO: 6301 - DNA, 22 bp, Artificial Sequence
  Description of Artificial Sequence: Synthetic oligonucleotide
aataatatggctatacaggccc

SEQ ID NO: 6302 - DNA, 22 bp, Artificial Sequence
  Description of Artificial Sequence: Synthetic oligonucleotide
aatgcttataaatgaataccgg

SEQ ID NO: 6303 - DNA, 22 bp, Artificial Sequence
  Description of Artificial Sequence: Synthetic oligonucleotide
atttaagatctgtatcctggct

SEQ ID NO: 6304 - DNA, 22 bp, Artificial Sequence
  Description of Artificial Sequence: Synthetic oligonucleotide
attagcaatgacatctttgggc

SEQ ID NO: 6305 - DNA, 22 bp, Artificial Sequence
  Description of Artificial Sequence: Synthetic oligonucleotide
aatacattaagcatgaagccga

SEQ ID NO: 6306 - DNA, 22 bp, Artificial Sequence
  Description of Artificial Sequence: Synthetic oligonucleotide
attaagcatgaagccgaaaggt

SEQ ID NO: 6307 - DNA, 22 bp, Artificial Sequence
  Description of Artificial Sequence: Synthetic oligonucleotide
atttaagttagctgggtcacct

SEQ ID NO: 6308 - DNA, 22 bp, Artificial Sequence
  Description of Artificial Sequence: Synthetic oligonucleotide
ttcttagttcaatttccttgct

SEQ ID NO: 6309 - DNA, 22 bp, Artificial Sequence
  Description of Artificial Sequence: Synthetic oligonucleotide
tttatgtatcgattcttgtgct

SEQ ID NO: 6310 - DNA, 22 bp, Artificial Sequence
  Description of Artificial Sequence: Synthetic oligonucleotide
ataaattaagactcctattggg

SEQ ID NO: 6311 - DNA, 22 bp, Artificial Sequence
  Description of Artificial Sequence: Synthetic oligonucleotide
atatcatttagtcacctcagct

SEQ ID NO: 6312 - DNA, 22 bp, Artificial Sequence
  Description of Artificial Sequence: Synthetic oligonucleotide
tataatggtagaaacatgagga

SEQ ID NO: 6313 - DNA, 22 bp, Artificial Sequence
  Description of Artificial Sequence: Synthetic oligonucleotide
tttaatggcatcagacaaggcc

SEQ ID NO: 6314 - DNA, 22 bp, Artificial Sequence
  Description of Artificial Sequence: Synthetic oligonucleotide
atctccttgaggttacacaggt

SEQ ID NO: 6315 - DNA, 22 bp, Artificial Sequence
  Description of Artificial Sequence: Synthetic oligonucleotide
tttcttggcaagatgaacaggt

SEQ ID NO: 6316 - DNA, 22 bp, Artificial Sequence
  Description of Artificial Sequence: Synthetic oligonucleotide
tttcttcagagccttgatggcg

SEQ ID NO: 6317 - DNA, 22 bp, Artificial Sequence
  Description of Artificial Sequence: Synthetic oligonucleotide
atttattatcttcagcactgct

SEQ ID NO: 6318 - DNA, 22 bp, Artificial Sequence
  Description of Artificial Sequence: Synthetic oligonucleotide
atatttgtgcagtgttcttggt

SEQ ID NO: 6319 - DNA, 22 bp, Artificial Sequence
  Description of Artificial Sequence: Synthetic oligonucleotide
ttcattgaaactttaaagacct

SEQ ID NO: 6320 - DNA, 22 bp, Artificial Sequence
  Description of Artificial Sequence: Synthetic oligonucleotide
ttaagcagcaaaggagggtgga

SEQ ID NO: 6321 - DNA, 22 bp, Artificial Sequence
  Description of Artificial Sequence: Synthetic oligonucleotide
atatatctctgtgtcatctggc

SEQ ID NO: 6322 - DNA, 22 bp, Artificial Sequence
  Description of Artificial Sequence: Synthetic oligonucleotide
ttacagtgggatcctgacaggt

SEQ ID NO: 6323 - DNA, 22 bp, Artificial Sequence
  Description of Artificial Sequence: Synthetic oligonucleotide
atatgaaatgtaggatttggca

SEQ ID NO: 6324 - DNA, 22 bp, Artificial Sequence
  Description of Artificial Sequence: Synthetic oligonucleotide
tataatgaaatccttctggccc

SEQ ID NO: 6325 - DNA, 22 bp, Artificial Sequence
  Description of Artificial Sequence: Synthetic oligonucleotide
tatacacatttgtttccttccc

SEQ ID NO: 6326 - DNA, 22 bp, Artificial Sequence
  Description of Artificial Sequence: Synthetic oligonucleotide
atatctcaagatgttccttgct

SEQ ID NO: 6327 - DNA, 22 bp, Artificial Sequence
  Description of Artificial Sequence: Synthetic oligonucleotide
taatacaaatcacacagacgcc

SEQ ID NO: 6328 - DNA, 22 bp, Artificial Sequence
  Description of Artificial Sequence: Synthetic oligonucleotide
ttgcttgagaacattaagtcct

SEQ ID NO: 6329 - DNA, 22 bp, Artificial Sequence
  Description of Artificial Sequence: Synthetic oligonucleotide
tttcactgtaattcagcctggc

SEQ ID NO: 6330 - DNA, 22 bp, Artificial Sequence
  Description of Artificial Sequence: Synthetic oligonucleotide
taaacttgaaatagcagcaggt

SEQ ID NO: 6331 - DNA, 22 bp, Artificial Sequence
  Description of Artificial Sequence: Synthetic oligonucleotide
atcatcacacaggtcatagggc

SEQ ID NO: 6332 - DNA, 22 bp, Artificial Sequence
  Description of Artificial Sequence: Synthetic oligonucleotide
ttatagtagttgaacatgtcgc

SEQ ID NO: 6333 - DNA, 22 bp, Artificial Sequence
  Description of Artificial Sequence: Synthetic oligonucleotide
aatatttgtatattcgtgccct

SEQ ID NO: 6334 - DNA, 22 bp, Artificial Sequence
  Description of Artificial Sequence: Synthetic oligonucleotide
ttcatctaactgcttgtcaggg

SEQ ID NO: 6335 - DNA, 22 bp, Artificial Sequence
  Description of Artificial Sequence: Synthetic oligonucleotide
ttccttcagaggtttacaggct

SEQ ID NO: 6336 - DNA, 22 bp, Artificial Sequence
  Description of Artificial Sequence: Synthetic oligonucleotide
atatagtgaaattccaaagcca

SEQ ID NO: 6337 - DNA, 22 bp, Artificial Sequence
  Description of Artificial Sequence: Synthetic oligonucleotide
tataatcttcagcttgttgcct

SEQ ID NO: 6338 - DNA, 22 bp, Artificial Sequence
  Description of Artificial Sequence: Synthetic oligonucleotide
ataagtaaatgactcaacacct

SEQ ID NO: 6339 - DNA, 22 bp, Artificial Sequence
  Description of Artificial Sequence: Synthetic oligonucleotide
aatattcaagagggcatctgct

SEQ ID NO: 6340 - DNA, 22 bp, Artificial Sequence
  Description of Artificial Sequence: Synthetic oligonucleotide
attcatttagaattacaaggct

SEQ ID NO: 6341 - DNA, 22 bp, Artificial Sequence
  Description of Artificial Sequence: Synthetic oligonucleotide
tatcatttagataaagtgggct

SEQ ID NO: 6342 - DNA, 22 bp, Artificial Sequence
  Description of Artificial Sequence: Synthetic oligonucleotide
attggatgtattaaactttgca

SEQ ID NO: 6343 - DNA, 22 bp, Artificial Sequence
  Description of Artificial Sequence: Synthetic oligonucleotide
tattgcattcaagactatgggc

SEQ ID NO: 6344 - DNA, 22 bp, Artificial Sequence
  Description of Artificial Sequence: Synthetic oligonucleotide
taaatactacaattggaatggc

SEQ ID NO: 6345 - DNA, 22 bp, Artificial Sequence
  Description of Artificial Sequence: Synthetic oligonucleotide
tttattcttctgagcattggca

SEQ ID NO: 6346 - DNA, 22 bp, Artificial Sequence
  Description of Artificial Sequence: Synthetic oligonucleotide
tttctcaatctctggcattcct

SEQ ID NO: 6347 - DNA, 22 bp, Artificial Sequence
  Description of Artificial Sequence: Synthetic oligonucleotide
ttaattactcagaagtctaggc

SEQ ID NO: 6348 - DNA, 22 bp, Artificial Sequence
  Description of Artificial Sequence: Synthetic oligonucleotide
tagattcttaatgaaagctggc

SEQ ID NO: 6349 - DNA, 22 bp, Artificial Sequence
  Description of Artificial Sequence: Synthetic oligonucleotide
ttctgagatgacttctactgtt

SEQ ID NO: 6350 - DNA, 22 bp, Artificial Sequence
  Description of Artificial Sequence: Synthetic oligonucleotide
attaattctaccctttaaaggt

SEQ ID NO: 6351 - DNA, 22 bp, Artificial Sequence
  Description of Artificial Sequence: Synthetic oligonucleotide
tttctttgaagtagaatgacca

SEQ ID NO: 6352 - DNA, 22 bp, Artificial Sequence
  Description of Artificial Sequence: Synthetic oligonucleotide
aatttctaacaactgaatgggc

SEQ ID NO: 6353 - DNA, 22 bp, Artificial Sequence
  Description of Artificial Sequence: Synthetic oligonucleotide
tacccattagacatatccagct

SEQ ID NO: 6354 - DNA, 22 bp, Artificial Sequence
  Description of Artificial Sequence: Synthetic oligonucleotide
tattattcacccaagcctccgg

SEQ ID NO: 6355 - DNA, 22 bp, Artificial Sequence
  Description of Artificial Sequence: Synthetic oligonucleotide
taatctgatgctaacaatgcct

SEQ ID NO: 6356 - DNA, 22 bp, Artificial Sequence
  Description of Artificial Sequence: Synthetic oligonucleotide
atgttcattaagatgtatggct

SEQ ID NO: 6357 - DNA, 22 bp, Artificial Sequence
  Description of Artificial Sequence: Synthetic oligonucleotide
ttagataaatattgacctccca

SEQ ID NO: 6358 - DNA, 22 bp, Artificial Sequence
  Description of Artificial Sequence: Synthetic oligonucleotide
ttgacgagagaatttcttcggg

SEQ ID NO: 6359 - DNA, 22 bp, Artificial Sequence
  Description of Artificial Sequence: Synthetic oligonucleotide
taaccatctaaagattacaggt

SEQ ID NO: 6360 - DNA, 22 bp, Artificial Sequence
  Description of Artificial Sequence: Synthetic oligonucleotide
tacttatatgaaactccaggcg

SEQ ID NO: 6361 - DNA, 22 bp, Artificial Sequence
  Description of Artificial Sequence: Synthetic oligonucleotide
ttgatggaagaatctctgagca

SEQ ID NO: 6362 - DNA, 22 bp, Artificial Sequence
  Description of Artificial Sequence: Synthetic oligonucleotide
ttctttgaactgtacaaggcca

SEQ ID NO: 6363 - DNA, 22 bp, Artificial Sequence
  Description of Artificial Sequence: Synthetic oligonucleotide
ttaaatttattgggcaacaggc

SEQ ID NO: 6364 - DNA, 22 bp, Artificial Sequence
  Description of Artificial Sequence: Synthetic oligonucleotide
aagtttacaaatcactactgga

SEQ ID NO: 6365 - DNA, 22 bp, Artificial Sequence
  Description of Artificial Sequence: Synthetic oligonucleotide
ttatagagggtctaagcaggca

SEQ ID NO: 6366 - DNA, 22 bp, Artificial Sequence
  Description of Artificial Sequence: Synthetic oligonucleotide
ttattaattgctggacaaccgt

SEQ ID NO: 6367 - DNA, 22 bp, Artificial Sequence
  Description of Artificial Sequence: Synthetic oligonucleotide
attcatattcaatttctgtccc

SEQ ID NO: 6368 - DNA, 22 bp, Artificial Sequence
  Description of Artificial Sequence: Synthetic oligonucleotide
ttgaattatccttctaattcca

SEQ ID NO: 6369 - DNA, 22 bp, Artificial Sequence
  Description of Artificial Sequence: Synthetic oligonucleotide
aacaataacatgaagatcaccc

SEQ ID NO: 6370 - DNA, 22 bp, Artificial Sequence
  Description of Artificial Sequence: Synthetic oligonucleotide
ttagtggaggaagattccgggc

SEQ ID NO: 6371 - DNA, 22 bp, Artificial Sequence
  Description of Artificial Sequence: Synthetic oligonucleotide
attaacaattcatctgatgccg

SEQ ID NO: 6372 - DNA, 22 bp, Artificial Sequence
  Description of Artificial Sequence: Synthetic oligonucleotide
attatgtaaggcagatcagccc

SEQ ID NO: 6373 - DNA, 22 bp, Artificial Sequence
  Description of Artificial Sequence: Synthetic oligonucleotide
atttatttgcacagtgtctgga

SEQ ID NO: 6374 - DNA, 22 bp, Artificial Sequence
  Description of Artificial Sequence: Synthetic oligonucleotide
ataattattggccctcactgca

SEQ ID NO: 6375 - DNA, 22 bp, Artificial Sequence
  Description of Artificial Sequence: Synthetic oligonucleotide
aatttaattctcagcacttcct

SEQ ID NO: 6376 - DNA, 22 bp, Artificial Sequence
  Description of Artificial Sequence: Synthetic oligonucleotide
taatctattaacgaagaagccc

SEQ ID NO: 6377 - DNA, 22 bp, Artificial Sequence
  Description of Artificial Sequence: Synthetic oligonucleotide
tttagtcagggaagccaagcca

SEQ ID NO: 6378 - DNA, 22 bp, Artificial Sequence
  Description of Artificial Sequence: Synthetic oligonucleotide
attgcattcaagactatgggca

SEQ ID NO: 6379 - DNA, 22 bp, Artificial Sequence
  Description of Artificial Sequence: Synthetic oligonucleotide
atttaatttgcacaaaggaggc

SEQ ID NO: 6380 - DNA, 22 bp, Artificial Sequence
  Description of Artificial Sequence: Synthetic oligonucleotide
aatatagatatctatgcttccc

SEQ ID NO: 6381 - DNA, 22 bp, Artificial Sequence
  Description of Artificial Sequence: Synthetic oligonucleotide
ttctctgatcagcatcaatggc

SEQ ID NO: 6382 - DNA, 22 bp, Artificial Sequence
  Description of Artificial Sequence: Synthetic oligonucleotide
ttaatttgcatttccatggcct

SEQ ID NO: 6383 - DNA, 22 bp, Artificial Sequence
  Description of Artificial Sequence: Synthetic oligonucleotide
atttaggatccaataattccct

SEQ ID NO: 6384 - DNA, 22 bp, Artificial Sequence
  Description of Artificial Sequence: Synthetic oligonucleotide
ttgctatttgtatattctcccg

SEQ ID NO: 6385 - DNA, 22 bp, Artificial Sequence
  Description of Artificial Sequence: Synthetic oligonucleotide
tttatatatgtggtgtcctggt

SEQ ID NO: 6386 - DNA, 22 bp, Artificial Sequence
  Description of Artificial Sequence: Synthetic oligonucleotide
atttggtcaaactttgctgggc

SEQ ID NO: 6387 - DNA, 22 bp, Artificial Sequence
  Description of Artificial Sequence: Synthetic oligonucleotide
atatcatttagataaagtgggc

SEQ ID NO: 6388 - DNA, 22 bp, Artificial Sequence
  Description of Artificial Sequence: Synthetic oligonucleotide
atttatagtcagagtctttggc

SEQ ID NO: 6389 - DNA, 22 bp, Artificial Sequence
  Description of Artificial Sequence: Synthetic oligonucleotide
aattcccatcaactcgattcca

SEQ ID NO: 6390 - DNA, 22 bp, Artificial Sequence
  Description of Artificial Sequence: Synthetic oligonucleotide
tatagggttcaggatgaagggc

SEQ ID NO: 6391 - DNA, 22 bp, Artificial Sequence
  Description of Artificial Sequence: Synthetic oligonucleotide
ataatgattcaaagggagacca

SEQ ID NO: 6392 - DNA, 22 bp, Artificial Sequence
  Description of Artificial Sequence: Synthetic oligonucleotide
tatttctgtatgatattctgct

SEQ ID NO: 6393 - DNA, 22 bp, Artificial Sequence
  Description of Artificial Sequence: Synthetic oligonucleotide
ttattgttgacttcacagtcca

SEQ ID NO: 6394 - DNA, 22 bp, Artificial Sequence
  Description of Artificial Sequence: Synthetic oligonucleotide
atagattgcagggatcgtaccc

SEQ ID NO: 6395 - DNA, 22 bp, Artificial Sequence
  Description of Artificial Sequence: Synthetic oligonucleotide
atattaatccactgatcttccc

SEQ ID NO: 6396 - DNA, 22 bp, Artificial Sequence
  Description of Artificial Sequence: Synthetic oligonucleotide
ttagcagttaatgttgttggct

SEQ ID NO: 6397 - DNA, 22 bp, Artificial Sequence
  Description of Artificial Sequence: Synthetic oligonucleotide
tttgctaaagggatagcttggc

SEQ ID NO: 6398 - DNA, 22 bp, Artificial Sequence
  Description of Artificial Sequence: Synthetic oligonucleotide
ttcatttacagaggcaagtccc

SEQ ID NO: 6399 - DNA, 22 bp, Artificial Sequence
  Description of Artificial Sequence: Synthetic oligonucleotide
tataattcagggaaactgaggt

SEQ ID NO: 6400 - DNA, 22 bp, Artificial Sequence
  Description of Artificial Sequence: Synthetic oligonucleotide
tttattggcaacttagaatgca

SEQ ID NO: 6401 - DNA, 22 bp, Artificial Sequence
  Description of Artificial Sequence: Synthetic oligonucleotide
ttattaaaggcattcttcacct

SEQ ID NO: 6402 - DNA, 22 bp, Artificial Sequence
  Description of Artificial Sequence: Synthetic oligonucleotide
tttacagtcagtacctaaaccc

SEQ ID NO: 6403 - DNA, 22 bp, Artificial Sequence
  Description of Artificial Sequence: Synthetic oligonucleotide
tttattaattgctggacaaccg

SEQ ID NO: 6404 - DNA, 22 bp, Artificial Sequence
  Description of Artificial Sequence: Synthetic oligonucleotide
atgcagcatgacaaatccaggc

SEQ ID NO: 6405 - DNA, 22 bp, Artificial Sequence
  Description of Artificial Sequence: Synthetic oligonucleotide
ttattactacgaatggcttcgg

SEQ ID NO: 6406 - DNA, 22 bp, Artificial Sequence
  Description of Artificial Sequence: Synthetic oligonucleotide
atcatataacctgggaagcgct

SEQ ID NO: 6407 - DNA, 22 bp, Artificial Sequence
  Description of Artificial Sequence: Synthetic oligonucleotide
ataaattagagggaggtcaggg

SEQ ID NO: 6408 - DNA, 22 bp, Artificial Sequence
  Description of Artificial Sequence: Synthetic oligonucleotide
atattccttaaacttcttggca

SEQ ID NO: 6409 - DNA, 22 bp, Artificial Sequence
  Description of Artificial Sequence: Synthetic oligonucleotide
ttccagtatctgttcaagtgcc

SEQ ID NO: 6410 - DNA, 22 bp, Artificial Sequence
  Description of Artificial Sequence: Synthetic oligonucleotide
tttcacagcctcttctacagga

SEQ ID NO: 6411 - DNA, 22 bp, Artificial Sequence
  Description of Artificial Sequence: Synthetic oligonucleotide
tatattctacccaaggacagca

SEQ ID NO: 6412 - DNA, 22 bp, Artificial Sequence
  Description of Artificial Sequence: Synthetic oligonucleotide
tttcctttgaaattcaagacct

SEQ ID NO: 6413 - DNA, 22 bp, Artificial Sequence
  Description of Artificial Sequence: Synthetic oligonucleotide
tatttcttccaccttgagccga

SEQ ID NO: 6414 - DNA, 22 bp, Artificial Sequence
  Description of Artificial Sequence: Synthetic oligonucleotide
ttaacaatcagtagagggccca

SEQ ID NO: 6415 - DNA, 22 bp, Artificial Sequence
  Description of Artificial Sequence: Synthetic oligonucleotide
atgaacctcaataattacaggc

SEQ ID NO: 6416 - DNA, 22 bp, Artificial Sequence
  Description of Artificial Sequence: Synthetic oligonucleotide
ttgtatatccatgtcatcacct

SEQ ID NO: 6417 - DNA, 22 bp, Artificial Sequence
  Description of Artificial Sequence: Synthetic oligonucleotide
ttcaaaggtgataatctgggtt

SEQ ID NO: 6418 - DNA, 22 bp, Artificial Sequence
  Description of Artificial Sequence: Synthetic oligonucleotide
atattccagtccttgtcaagga

SEQ ID NO: 6419 - DNA, 22 bp, Artificial Sequence
  Description of Artificial Sequence: Synthetic oligonucleotide
tttaagtccaaataaacaggca

SEQ ID NO: 6420 - DNA, 22 bp, Artificial Sequence
  Description of Artificial Sequence: Synthetic oligonucleotide
tatcgatgagctctgacaggct

SEQ ID NO: 6421 - DNA, 22 bp, Artificial Sequence
  Description of Artificial Sequence: Synthetic oligonucleotide
ttcttctttgagagtctgtcca

SEQ ID NO: 6422 - DNA, 22 bp, Artificial Sequence
  Description of Artificial Sequence: Synthetic oligonucleotide
atatttaatcacttcggacgct

SEQ ID NO: 6423 - DNA, 22 bp, Artificial Sequence
  Description of Artificial Sequence: Synthetic oligonucleotide
atctagaacagtctggttggcg

SEQ ID NO: 6424 - DNA, 22 bp, Artificial Sequence
  Description of Artificial Sequence: Synthetic oligonucleotide
aattcttcagtatctaatcgcc

SEQ ID NO: 6425 - DNA, 22 bp, Artificial Sequence
  Description of Artificial Sequence: Synthetic oligonucleotide
tatgggtgaaacaggcatgcgt

SEQ ID NO: 6426 - DNA, 22 bp, Artificial Sequence
  Description of Artificial Sequence: Synthetic oligonucleotide
atatttcagctcagcatttggt

SEQ ID NO: 6427 - DNA, 22 bp, Artificial Sequence
  Description of Artificial Sequence: Synthetic oligonucleotide
tagaacatggacgtcatagccc

SEQ ID NO: 6428 - DNA, 22 bp, Artificial Sequence
  Description of Artificial Sequence: Synthetic oligonucleotide
taaatataaatgtgtaaatcct

SEQ ID NO: 6429 - DNA, 22 bp, Artificial Sequence
  Description of Artificial Sequence: Synthetic oligonucleotide
tttgttaaacaaggatttgccc

SEQ ID NO: 6430 - DNA, 22 bp, Artificial Sequence
  Description of Artificial Sequence: Synthetic oligonucleotide
attctccaggaaatgcattggt

SEQ ID NO: 6431 - DNA, 22 bp, Artificial Sequence
  Description of Artificial Sequence: Synthetic oligonucleotide
ttcgtttgccagatatattcgt

SEQ ID NO: 6432 - DNA, 22 bp, Artificial Sequence
  Description of Artificial Sequence: Synthetic oligonucleotide
taacaaaccaagtcctaagccc

SEQ ID NO: 6433 - DNA, 22 bp, Artificial Sequence
  Description of Artificial Sequence: Synthetic oligonucleotide
tttaacagaaacttattctgcc

SEQ ID NO: 6434 - DNA, 22 bp, Artificial Sequence
  Description of Artificial Sequence: Synthetic oligonucleotide
ttattctcaatcacagggagct

SEQ ID NO: 6435 - DNA, 22 bp, Artificial Sequence
  Description of Artificial Sequence: Synthetic oligonucleotide
taacatcaagctcctggctggc

SEQ ID NO: 6436 - DNA, 22 bp, Artificial Sequence
  Description of Artificial Sequence: Synthetic oligonucleotide
atattcaccacgagtgaaagct

SEQ ID NO: 6437 - DNA, 22 bp, Artificial Sequence
  Description of Artificial Sequence: Synthetic oligonucleotide
tatggaagaaatgagttacggg

SEQ ID NO: 6438 - DNA, 22 bp, Artificial Sequence
  Description of Artificial Sequence: Synthetic oligonucleotide
ttgtaatagacacacaggaggt

SEQ ID NO: 6439 - DNA, 22 bp, Artificial Sequence
  Description of Artificial Sequence: Synthetic oligonucleotide
atttattactcaccttccacgt

SEQ ID NO: 6440 - DNA, 22 bp, Artificial Sequence
  Description of Artificial Sequence: Synthetic oligonucleotide
ttacaatctcatcctgcttgca

SEQ ID NO: 6441 - DNA, 22 bp, Artificial Sequence
  Description of Artificial Sequence: Synthetic oligonucleotide
tattatgagaatgtctttgggc

SEQ ID NO: 6442 - DNA, 22 bp, Artificial Sequence
  Description of Artificial Sequence: Synthetic oligonucleotide
tatttgttaaacagttcccgca

SEQ ID NO: 6443 - DNA, 22 bp, Artificial Sequence
  Description of Artificial Sequence: Synthetic oligonucleotide
ttagcttaatacacagagaccc

SEQ ID NO: 6444 - DNA, 22 bp, Artificial Sequence
  Description of Artificial Sequence: Synthetic oligonucleotide
tttattatggaaagaactggca

SEQ ID NO: 6445 - DNA, 22 bp, Artificial Sequence
  Description of Artificial Sequence: Synthetic oligonucleotide
attatctggcggtaagactcct

SEQ ID NO: 6446 - DNA, 22 bp, Artificial Sequence
  Description of Artificial Sequence: Synthetic oligonucleotide
aataatttcaggaacatgggcc

SEQ ID NO: 6447 - DNA, 22 bp, Artificial Sequence
  Description of Artificial Sequence: Synthetic oligonucleotide
tacagatacaggtgaactggcc

SEQ ID NO: 6448 - DNA, 22 bp, Artificial Sequence
  Description of Artificial Sequence: Synthetic oligonucleotide
atatctccaaagacagtaactg

SEQ ID NO: 6449 - DNA, 22 bp, Artificial Sequence
  Description of Artificial Sequence: Synthetic oligonucleotide
ttgtcgtttcccagcgctgcgc

SEQ ID NO: 6450 - DNA, 22 bp, Artificial Sequence
  Description of Artificial Sequence: Synthetic oligonucleotide
taaatggttaaatagctgccca

SEQ ID NO: 6451 - DNA, 22 bp, Artificial Sequence
  Description of Artificial Sequence: Synthetic oligonucleotide
tttgaacatcctccattagctt

SEQ ID NO: 6452 - DNA, 22 bp, Artificial Sequence
  Description of Artificial Sequence: Synthetic oligonucleotide
tatcactaactgttcccaagct

SEQ ID NO: 6453 - DNA, 22 bp, Artificial Sequence
  Description of Artificial Sequence: Synthetic oligonucleotide
ttcagtttctaatgcaagggtc

SEQ ID NO: 6454 - DNA, 22 bp, Artificial Sequence
  Description of Artificial Sequence: Synthetic oligonucleotide
tttattgtgcttgtcaggacag

SEQ ID NO: 6455 - DNA, 22 bp, Artificial Sequence
  Description of Artificial Sequence: Synthetic oligonucleotide
ttcatttagtctggaataggca

SEQ ID NO: 6456 - DNA, 22 bp, Artificial Sequence
  Description of Artificial Sequence: Synthetic oligonucleotide
atataagttcagggatctgccc

SEQ ID NO: 6457 - DNA, 22 bp, Artificial Sequence
  Description of Artificial Sequence: Synthetic oligonucleotide
aataattctaatgccagaggct

SEQ ID NO: 6458 - DNA, 22 bp, Artificial Sequence
  Description of Artificial Sequence: Synthetic oligonucleotide
ttattatgagaatgtctttggg

SEQ ID NO: 6459 - DNA, 22 bp, Artificial Sequence
  Description of Artificial Sequence: Synthetic oligonucleotide
atattcctcagtatttgggcgg

SEQ ID NO: 6460 - DNA, 22 bp, Artificial Sequence
  Description of Artificial Sequence: Synthetic oligonucleotide
atatattaacagcatttctgga

SEQ ID NO: 6461 - DNA, 22 bp, Artificial Sequence
  Description of Artificial Sequence: Synthetic oligonucleotide
atccattcatacgtccttcggt

SEQ ID NO: 6462 - DNA, 22 bp, Artificial Sequence
  Description of Artificial Sequence: Synthetic oligonucleotide
aagtaacataaccatctctcgg

SEQ ID NO: 6463 - DNA, 22 bp, Artificial Sequence
  Description of Artificial Sequence: Synthetic oligonucleotide
tacacttagaagatcctaacct

SEQ ID NO: 6464 - DNA, 22 bp, Artificial Sequence
  Description of Artificial Sequence: Synthetic oligonucleotide
ttaacagaaatgttgaagggct

SEQ ID NO: 6465 - DNA, 22 bp, Artificial Sequence
  Description of Artificial Sequence: Synthetic oligonucleotide
attccctttgatgctgtctggt

SEQ ID NO: 6466 - DNA, 22 bp, Artificial Sequence
  Description of Artificial Sequence: Synthetic oligonucleotide
tatttcttagaaaccatgtgga

SEQ ID NO: 6467 - DNA, 22 bp, Artificial Sequence
  Description of Artificial Sequence: Synthetic oligonucleotide
attatgctagagacaatctgga

SEQ ID NO: 6468 - DNA, 22 bp, Artificial Sequence
  Description of Artificial Sequence: Synthetic oligonucleotide
ttatagaataaagttgcctgct

SEQ ID NO: 6469 - DNA, 22 bp, Artificial Sequence
  Description of Artificial Sequence: Synthetic oligonucleotide
atcaataaacacatttccagct

SEQ ID NO: 6470 - DNA, 22 bp, Artificial Sequence
  Description of Artificial Sequence: Synthetic oligonucleotide
tattaatacttaacaaagccct

SEQ ID NO: 6471 - DNA, 22 bp, Artificial Sequence
  Description of Artificial Sequence: Synthetic oligonucleotide
ttaggttgagactgacactggc

SEQ ID NO: 6472 - DNA, 22 bp, Artificial Sequence
  Description of Artificial Sequence: Synthetic oligonucleotide
tattaataccctgtgaactgca

SEQ ID NO: 6473 - DNA, 22 bp, Artificial Sequence
  Description of Artificial Sequence: Synthetic oligonucleotide
taattcccagaatacagctccc

SEQ ID NO: 6474 - DNA, 22 bp, Artificial Sequence
  Description of Artificial Sequence: Synthetic oligonucleotide
ttatatgttgtgttaaatggtc

SEQ ID NO: 6475 - DNA, 22 bp, Artificial Sequence
  Description of Artificial Sequence: Synthetic oligonucleotide
tttatttcttgatcaaactgct

SEQ ID NO: 6476 - DNA, 22 bp, Artificial Sequence
  Description of Artificial Sequence: Synthetic oligonucleotide
ttggaggaatatatcttcacct

SEQ ID NO: 6477 - DNA, 22 bp, Artificial Sequence
  Description of Artificial Sequence: Synthetic oligonucleotide
atacctggtctgcttggtcggc

SEQ ID NO: 6478 - DNA, 22 bp, Artificial Sequence
  Description of Artificial Sequence: Synthetic oligonucleotide
tttgtactcaagacagcaggcc

SEQ ID NO: 6479 - DNA, 22 bp, Artificial Sequence
  Description of Artificial Sequence: Synthetic oligonucleotide
ttattctataaatggacaccga

SEQ ID NO: 6480 - DNA, 22 bp, Artificial Sequence
  Description of Artificial Sequence: Synthetic oligonucleotide
ttaatacaacagcttagtgcca

SEQ ID NO: 6481 - DNA, 22 bp, Artificial Sequence
  Description of Artificial Sequence: Synthetic oligonucleotide
atattccttgtcattatctgca

SEQ ID NO: 6482 - DNA, 22 bp, Artificial Sequence
  Description of Artificial Sequence: Synthetic oligonucleotide
tttgtgttaactaataactggg

SEQ ID NO: 6483 - DNA, 22 bp, Artificial Sequence
  Description of Artificial Sequence: Synthetic oligonucleotide
ttaactagaacactagagggcc

SEQ ID NO: 6484 - DNA, 22 bp, Artificial Sequence
  Description of Artificial Sequence: Synthetic oligonucleotide
tttaattccaatctctttggca

SEQ ID NO: 6485 - DNA, 22 bp, Artificial Sequence
  Description of Artificial Sequence: Synthetic oligonucleotide
ttatttattgccaaatttgggc

SEQ ID NO: 6486 - DNA, 22 bp, Artificial Sequence
  Description of Artificial Sequence: Synthetic oligonucleotide
atagtttaaagatggagggccc

SEQ ID NO: 6487 - DNA, 22 bp, Artificial Sequence
  Description of Artificial Sequence: Synthetic oligonucleotide
tattcaactcttcttggatggc

SEQ ID NO: 6488 - DNA, 22 bp, Artificial Sequence
  Description of Artificial Sequence: Synthetic oligonucleotide
tatttattgccaaatttgggcg

SEQ ID NO: 6489 - DNA, 22 bp, Artificial Sequence
  Description of Artificial Sequence: Synthetic oligonucleotide
tattgtgtcaatttcactggct

SEQ ID NO: 6490 - DNA, 22 bp, Artificial Sequence
  Description of Artificial Sequence: Synthetic oligonucleotide
tttgattactattcaacttgct

SEQ ID NO: 6491 - DNA, 22 bp, Artificial Sequence
  Description of Artificial Sequence: Synthetic oligonucleotide
atagctgataaacttatgggcc

SEQ ID NO: 6492 - DNA, 22 bp, Artificial Sequence
  Description of Artificial Sequence: Synthetic oligonucleotide
atcatttattggtttcattgca

SEQ ID NO: 6493 - DNA, 22 bp, Artificial Sequence
  Description of Artificial Sequence: Synthetic oligonucleotide
ttatgttattacaaagccagca

SEQ ID NO: 6494 - DNA, 22 bp, Artificial Sequence
  Description of Artificial Sequence: Synthetic oligonucleotide
atttcttctacactcttctgcc

SEQ ID NO: 6495 - DNA, 22 bp, Artificial Sequence
  Description of Artificial Sequence: Synthetic oligonucleotide
atttagaatcacatggtttcca

SEQ ID NO: 6496 - DNA, 22 bp, Artificial Sequence
  Description of Artificial Sequence: Synthetic oligonucleotide
ataatatacaactggctaaggg

SEQ ID NO: 6497 - DNA, 22 bp, Artificial Sequence
  Description of Artificial Sequence: Synthetic oligonucleotide
atctagccagattaacatggca

SEQ ID NO: 6498 - DNA, 22 bp, Artificial Sequence
  Description of Artificial Sequence: Synthetic oligonucleotide
tttaaggacaccaatatctggg

SEQ ID NO: 6499 - DNA, 22 bp, Artificial Sequence
  Description of Artificial Sequence: Synthetic oligonucleotide
tagttcccactaggatgatggg

SEQ ID NO: 6500 - DNA, 22 bp, Artificial Sequence
  Description of Artificial Sequence: Synthetic oligonucleotide
aattataatagcttacacaggc

SEQ ID NO: 6501 - DNA, 22 bp, Artificial Sequence
  Description of Artificial Sequence: Synthetic oligonucleotide
ttataatacctttgaaatgcct

SEQ ID NO: 6502 - DNA, 22 bp, Artificial Sequence
  Description of Artificial Sequence: Synthetic oligonucleotide
attattctataaatggacaccg

SEQ ID NO: 6503 - DNA, 22 bp, Artificial Sequence
  Description of Artificial Sequence: Synthetic oligonucleotide
taatttacacgaaagcaatgct

SEQ ID NO: 6504 - DNA, 22 bp, Artificial Sequence
  Description of Artificial Sequence: Synthetic oligonucleotide
ttccagtatctcattgacggcc

SEQ ID NO: 6505 - DNA, 22 bp, Artificial Sequence
  Description of Artificial Sequence: Synthetic oligonucleotide
attaaaccagagtaagaaagcc

SEQ ID NO: 6506 - DNA, 22 bp, Artificial Sequence
  Description of Artificial Sequence: Synthetic oligonucleotide
tatgcggatcaagtaaagtgcc

SEQ ID NO: 6507 - DNA, 22 bp, Artificial Sequence
  Description of Artificial Sequence: Synthetic oligonucleotide
ttaaacccaccatcaaggaggt

SEQ ID NO: 6508 - DNA, 22 bp, Artificial Sequence
  Description of Artificial Sequence: Synthetic oligonucleotide
ttattgataagcaggaatgccg

SEQ ID NO: 6509 - DNA, 22 bp, Artificial Sequence
  Description of Artificial Sequence: Synthetic oligonucleotide
tttcattaaacgtttaacagcc

SEQ ID NO: 6510 - DNA, 22 bp, Artificial Sequence
  Description of Artificial Sequence: Synthetic oligonucleotide
tttagccacagatatttcacct

SEQ ID NO: 6511 - DNA, 22 bp, Artificial Sequence
  Description of Artificial Sequence: Synthetic oligonucleotide
ttatttcttgaatccatgaccc

SEQ ID NO: 6512 - DNA, 22 bp, Artificial Sequence
  Description of Artificial Sequence: Synthetic oligonucleotide
taactctaggctgtgatgagct

SEQ ID NO: 6513 - DNA, 22 bp, Artificial Sequence
  Description of Artificial Sequence: Synthetic oligonucleotide
atatattcttactggctctggc

SEQ ID NO: 6514 - DNA, 22 bp, Artificial Sequence
  Description of Artificial Sequence: Synthetic oligonucleotide
ttactgtgatattggaatgccc

SEQ ID NO: 6515 - DNA, 22 bp, Artificial Sequence
  Description of Artificial Sequence: Synthetic oligonucleotide
atattcatccaggcaaatggca

SEQ ID NO: 6516 - DNA, 22 bp, Artificial Sequence
  Description of Artificial Sequence: Synthetic oligonucleotide
ttcatatatatggttccatggt

SEQ ID NO: 6517 - DNA, 22 bp, Artificial Sequence
  Description of Artificial Sequence: Synthetic oligonucleotide
atatgtaagctgatgacatgca

SEQ ID NO: 6518 - DNA, 22 bp, Artificial Sequence
  Description of Artificial Sequence: Synthetic oligonucleotide
attaatactcctgcaatgggcg

SEQ ID NO: 6519 - DNA, 22 bp, Artificial Sequence
  Description of Artificial Sequence: Synthetic oligonucleotide
atattatttcacttggcatggt

SEQ ID NO: 6520 - DNA, 22 bp, Artificial Sequence
  Description of Artificial Sequence: Synthetic oligonucleotide
tatttctatgccatagttgcct

SEQ ID NO: 6521 - DNA, 22 bp, Artificial Sequence
  Description of Artificial Sequence: Synthetic oligonucleotide
attcttagcaatggtcattgct

SEQ ID NO: 6522 - DNA, 22 bp, Artificial Sequence
  Description of Artificial Sequence: Synthetic oligonucleotide
aattattgcctaataaatggca

SEQ ID NO: 6523 - DNA, 22 bp, Artificial Sequence
  Description of Artificial Sequence: Synthetic oligonucleotide
tttaataagcacatcatttgca

SEQ ID NO: 6524 - DNA, 22 bp, Artificial Sequence
  Description of Artificial Sequence: Synthetic oligonucleotide
aatttctgtgcatagatccgca

SEQ ID NO: 6525 - DNA, 22 bp, Artificial Sequence
  Description of Artificial Sequence: Synthetic oligonucleotide
attaatttcacttgggcttcct

SEQ ID NO: 6526 - DNA, 22 bp, Artificial Sequence
  Description of Artificial Sequence: Synthetic oligonucleotide
taattatgtaatatgatttgct

SEQ ID NO: 6527 - DNA, 22 bp, Artificial Sequence
  Description of Artificial Sequence: Synthetic oligonucleotide
ttaaatcagttaactttggcgt

SEQ ID NO: 6528 - DNA, 22 bp, Artificial Sequence
  Description of Artificial Sequence: Synthetic oligonucleotide
tttactcagtacatcctcatta

SEQ ID NO: 6529 - DNA, 22 bp, Artificial Sequence
  Description of Artificial Sequence: Synthetic oligonucleotide
ttaactgcacagtaacaatgca

SEQ ID NO: 6530 - DNA, 22 bp, Artificial Sequence
  Description of Artificial Sequence: Synthetic oligonucleotide
aacattctttaggctgtttggt

SEQ ID NO: 6531 - DNA, 22 bp, Artificial Sequence
  Description of Artificial Sequence: Synthetic oligonucleotide
atattgtttgccatctttacct

SEQ ID NO: 6532 - DNA, 22 bp, Artificial Sequence
  Description of Artificial Sequence: Synthetic oligonucleotide
attcaatcaccaagcgtctgct

SEQ ID NO: 6533 - DNA, 22 bp, Artificial Sequence
  Description of Artificial Sequence: Synthetic oligonucleotide
ttcttaattcttgttcttgccg

SEQ ID NO: 6534 - DNA, 22 bp, Artificial Sequence
  Description of Artificial Sequence: Synthetic oligonucleotide
ttacagtgataactggtctggc

SEQ ID NO: 6535 - DNA, 22 bp, Artificial Sequence
  Description of Artificial Sequence: Synthetic oligonucleotide
atcatttatcaaatgctaacct

SEQ ID NO: 6536 - DNA, 22 bp, Artificial Sequence
  Description of Artificial Sequence: Synthetic oligonucleotide
ttaaagctggagcttaaagcct

SEQ ID NO: 6537 - DNA, 22 bp, Artificial Sequence
  Description of Artificial Sequence: Synthetic oligonucleotide
tttgagaatgccagtctgctct

SEQ ID NO: 6538 - DNA, 22 bp, Artificial Sequence
  Description of Artificial Sequence: Synthetic oligonucleotide
ataatggaccagtttgtgtcca

SEQ ID NO: 6539 - DNA, 22 bp, Artificial Sequence
  Description of Artificial Sequence: Synthetic oligonucleotide
tttgtgtgtcactttgatagcc

SEQ ID NO: 6540 - DNA, 22 bp, Artificial Sequence
  Description of Artificial Sequence: Synthetic oligonucleotide
aacttagatgcttaggatccgg

SEQ ID NO: 6541 - DNA, 22 bp, Artificial Sequence
  Description of Artificial Sequence: Synthetic oligonucleotide
atatatttggagatgctgaggg

SEQ ID NO: 6542 - DNA, 22 bp, Artificial Sequence
  Description of Artificial Sequence: Synthetic oligonucleotide
ttatcatttactccaggacggg

SEQ ID NO: 6543 - DNA, 22 bp, Artificial Sequence
  Description of Artificial Sequence: Synthetic oligonucleotide
atttcataggcgatggctccca

SEQ ID NO: 6544 - DNA, 22 bp, Artificial Sequence
  Description of Artificial Sequence: Synthetic oligonucleotide
ttatgaaagtccctccagaggc

SEQ ID NO: 6545 - DNA, 22 bp, Artificial Sequence
  Description of Artificial Sequence: Synthetic oligonucleotide
ttgtaatatacaatacaaagca

SEQ ID NO: 6546 - DNA, 22 bp, Artificial Sequence
  Description of Artificial Sequence: Synthetic oligonucleotide
ataatatttgttagtctctgca

SEQ ID NO: 6547 - DNA, 22 bp, Artificial Sequence
  Description of Artificial Sequence: Synthetic oligonucleotide
ttaagttacaagttggcaggca

SEQ ID NO: 6548 - DNA, 22 bp, Artificial Sequence
  Description of Artificial Sequence: Synthetic oligonucleotide
ttgtaattagagaagggaagcc

SEQ ID NO: 6549 - DNA, 22 bp, Artificial Sequence
  Description of Artificial Sequence: Synthetic oligonucleotide
ttggagtaagtctttgtgggca

SEQ ID NO: 6550 - DNA, 22 bp, Artificial Sequence
  Description of Artificial Sequence: Synthetic oligonucleotide
tacaaagaaggcaccaagggcg

SEQ ID NO: 6551 - DNA, 22 bp, Artificial Sequence
  Description of Artificial Sequence: Synthetic oligonucleotide
tttctagtccatgctaagcggt

SEQ ID NO: 6552 - DNA, 22 bp, Artificial Sequence
  Description of Artificial Sequence: Synthetic oligonucleotide
atttaacatggatgcgtcccgc

SEQ ID NO: 6553 - DNA, 22 bp, Artificial Sequence
  Description of Artificial Sequence: Synthetic oligonucleotide
ttcatgttcctcgcacatgggc

SEQ ID NO: 6554 - DNA, 22 bp, Artificial Sequence
  Description of Artificial Sequence: Synthetic oligonucleotide
tttatttcttcttgtcttgcct

SEQ ID NO: 6555 - DNA, 22 bp, Artificial Sequence
  Description of Artificial Sequence: Synthetic oligonucleotide
gatatatatcagagctcctggt

SEQ ID NO: 6556 - DNA, 22 bp, Artificial Sequence
  Description of Artificial Sequence: Synthetic oligonucleotide
ttctgtgtttctgttacacgtt

SEQ ID NO: 6557 - DNA, 22 bp, Artificial Sequence
  Description of Artificial Sequence: Synthetic oligonucleotide
ttatttctgcactccagcacgg

SEQ ID NO: 6558 - DNA, 22 bp, Artificial Sequence
  Description of Artificial Sequence: Synthetic oligonucleotide
aatgatctagacgcttgctggg

SEQ ID NO: 6559 - DNA, 22 bp, Artificial Sequence
  Description of Artificial Sequence: Synthetic oligonucleotide
ttaatttagtgttgggatacca

SEQ ID NO: 6560 - DNA, 22 bp, Artificial Sequence
  Description of Artificial Sequence: Synthetic oligonucleotide
tatttggatgatttccttggca

SEQ ID NO: 6561 - DNA, 22 bp, Artificial Sequence
  Description of Artificial Sequence: Synthetic oligonucleotide
aattagtccttaaggcacagct

SEQ ID NO: 6562 - DNA, 22 bp, Artificial Sequence
  Description of Artificial Sequence: Synthetic oligonucleotide
tatagcttcagcaataaaggct

SEQ ID NO: 6563 - DNA, 22 bp, Artificial Sequence
  Description of Artificial Sequence: Synthetic oligonucleotide
aatatcaaacaaatggaatcgg

SEQ ID NO: 6564 - DNA, 22 bp, Artificial Sequence
  Description of Artificial Sequence: Synthetic oligonucleotide
tttattaggctcctagtttcca

SEQ ID NO: 6565 - DNA, 22 bp, Artificial Sequence
  Description of Artificial Sequence: Synthetic oligonucleotide
atataaatagactgctttaggt

SEQ ID NO: 6566 - DNA, 22 bp, Artificial Sequence
  Description of Artificial Sequence: Synthetic oligonucleotide
tatgttatttaattcagctgga

SEQ ID NO: 6567 - DNA, 22 bp, Artificial Sequence
  Description of Artificial Sequence: Synthetic oligonucleotide
attccattacaataaacagcct

SEQ ID NO: 6568 - DNA, 22 bp, Artificial Sequence
  Description of Artificial Sequence: Synthetic oligonucleotide
ttaatattgccaccaaattcga

SEQ ID NO: 6569 - DNA, 22 bp, Artificial Sequence
  Description of Artificial Sequence: Synthetic oligonucleotide
ttcctgaacactttcacatggt

SEQ ID NO: 6570 - DNA, 22 bp, Artificial Sequence
  Description of Artificial Sequence: Synthetic oligonucleotide
ttgggatgtaatataattagcc

SEQ ID NO: 6571 - DNA, 22 bp, Artificial Sequence
  Description of Artificial Sequence: Synthetic oligonucleotide
taatctcattccattccacggg

SEQ ID NO: 6572 - DNA, 22 bp, Artificial Sequence
  Description of Artificial Sequence: Synthetic oligonucleotide
gtattctctctgatactgagct

SEQ ID NO: 6573 - DNA, 22 bp, Artificial Sequence
  Description of Artificial Sequence: Synthetic oligonucleotide
tatagacaaacagccagagcgt

SEQ ID NO: 6574 - DNA, 22 bp, Artificial Sequence
  Description of Artificial Sequence: Synthetic oligonucleotide
tacaataaccaagttgggaccc

SEQ ID NO: 6575 - DNA, 22 bp, Artificial Sequence
  Description of Artificial Sequence: Synthetic oligonucleotide
taatattaatttcacttgggct

SEQ ID NO: 6576 - DNA, 22 bp, Artificial Sequence
  Description of Artificial Sequence: Synthetic oligonucleotide
tttatctgccatggcatggccc

SEQ ID NO: 6577 - DNA, 22 bp, Artificial Sequence
  Description of Artificial Sequence: Synthetic oligonucleotide
tatttagatgagtttcacagct

SEQ ID NO: 6578 - DNA, 22 bp, Artificial Sequence
  Description of Artificial Sequence: Synthetic oligonucleotide
attatagtagagtttcagaccc

SEQ ID NO: 6579 - DNA, 22 bp, Artificial Sequence
  Description of Artificial Sequence: Synthetic oligonucleotide
ttcacttgataatctgtagggc

SEQ ID NO: 6580 - DNA, 22 bp, Artificial Sequence
  Description of Artificial Sequence: Synthetic oligonucleotide
tatattaaagaactcttcacca

SEQ ID NO: 6581 - DNA, 22 bp, Artificial Sequence
  Description of Artificial Sequence: Synthetic oligonucleotide
ttattctttggaagatattcct

SEQ ID NO: 6582 - DNA, 22 bp, Artificial Sequence
  Description of Artificial Sequence: Synthetic oligonucleotide
atttattctgaaaggcaatcgt

SEQ ID NO: 6583 - DNA, 22 bp, Artificial Sequence
  Description of Artificial Sequence: Synthetic oligonucleotide
tttctttgtcaagtatccaggc

SEQ ID NO: 6584 - DNA, 22 bp, Artificial Sequence
  Description of Artificial Sequence: Synthetic oligonucleotide
taatgtttcacggtatctccct

SEQ ID NO: 6585 - DNA, 22 bp, Artificial Sequence
  Description of Artificial Sequence: Synthetic oligonucleotide
aatagttaagcctatttgccca

SEQ ID NO: 6586 - DNA, 22 bp, Artificial Sequence
  Description of Artificial Sequence: Synthetic oligonucleotide
atttctttcatgtcattgtggt

SEQ ID NO: 6587 - DNA, 22 bp, Artificial Sequence
  Description of Artificial Sequence: Synthetic oligonucleotide
tttattagaagcatctgcaggg

SEQ ID NO: 6588 - DNA, 22 bp, Artificial Sequence
  Description of Artificial Sequence: Synthetic oligonucleotide
atttctagtccatgctaagcgg

SEQ ID NO: 6589 - DNA, 22 bp, Artificial Sequence
  Description of Artificial Sequence: Synthetic oligonucleotide
ttcttcatgaagctgacatcct

SEQ ID NO: 6590 - DNA, 22 bp, Artificial Sequence
  Description of Artificial Sequence: Synthetic oligonucleotide
tttatctcgccgaactgctgcc

SEQ ID NO: 6591 - DNA, 22 bp, Artificial Sequence
  Description of Artificial Sequence: Synthetic oligonucleotide
atcacttaagaaattgggccca

SEQ ID NO: 6592 - DNA, 22 bp, Artificial Sequence
  Description of Artificial Sequence: Synthetic oligonucleotide
atctttcttagatgagtgaccc

SEQ ID NO: 6593 - DNA, 22 bp, Artificial Sequence
  Description of Artificial Sequence: Synthetic oligonucleotide
ttcctttggctacatcagtggc

SEQ ID NO: 6594 - DNA, 22 bp, Artificial Sequence
  Description of Artificial Sequence: Synthetic oligonucleotide
tttaggagtcagtctgtatgcc

SEQ ID NO: 6595 - DNA, 22 bp, Artificial Sequence
  Description of Artificial Sequence: Synthetic oligonucleotide
taaacatatcagctgtttacct

SEQ ID NO: 6596 - DNA, 22 bp, Artificial Sequence
  Description of Artificial Sequence: Synthetic oligonucleotide
ttcccaaactattgaaagaccc

SEQ ID NO: 6597 - DNA, 22 bp, Artificial Sequence
  Description of Artificial Sequence: Synthetic oligonucleotide
tttaattatcttgttgactcct

SEQ ID NO: 6598 - DNA, 22 bp, Artificial Sequence
  Description of Artificial Sequence: Synthetic oligonucleotide
atgaaacatgaatgccatacct

SEQ ID NO: 6599 - DNA, 22 bp, Artificial Sequence
  Description of Artificial Sequence: Synthetic oligonucleotide
atataaagatagatttgctcct

SEQ ID NO: 6600 - DNA, 22 bp, Artificial Sequence
  Description of Artificial Sequence: Synthetic oligonucleotide
ctttagccgcagtttatctgct

SEQ ID NO: 6601 - DNA, 22 bp, Artificial Sequence
  Description of Artificial Sequence: Synthetic oligonucleotide
aataaataagaggaaggcagcc

SEQ ID NO: 6602 - DNA, 22 bp, Artificial Sequence
  Description of Artificial Sequence: Synthetic oligonucleotide
tttagtagcaacttaggttccc

SEQ ID NO: 6603 - DNA, 22 bp, Artificial Sequence
  Description of Artificial Sequence: Synthetic oligonucleotide
taaataagaggaaggcagccct

SEQ ID NO: 6604 - DNA, 22 bp, Artificial Sequence
  Description of Artificial Sequence: Synthetic oligonucleotide
tttaaagctgtaactatgtcca

SEQ ID NO: 6605 - DNA, 22 bp, Artificial Sequence
  Description of Artificial Sequence: Synthetic oligonucleotide
tttctggataatataatctgga

SEQ ID NO: 6606 - DNA, 22 bp, Artificial Sequence
  Description of Artificial Sequence: Synthetic oligonucleotide
atgatagctaagaaggagaggg

SEQ ID NO: 6607 - DNA, 22 bp, Artificial Sequence
  Description of Artificial Sequence: Synthetic oligonucleotide
aatttgcttgaatttctctccc

SEQ ID NO: 6608 - DNA, 22 bp, Artificial Sequence
  Description of Artificial Sequence: Synthetic oligonucleotide
tttactcctgtaatgttgaggt

SEQ ID NO: 6609 - DNA, 22 bp, Artificial Sequence
  Description of Artificial Sequence: Synthetic oligonucleotide
aatttctagtccatgctaagcg

SEQ ID NO: 6610 - DNA, 22 bp, Artificial Sequence
  Description of Artificial Sequence: Synthetic oligonucleotide
ttaaacagacctttagtgactg

SEQ ID NO: 6611 - DNA, 22 bp, Artificial Sequence
  Description of Artificial Sequence: Synthetic oligonucleotide
tataatcagcaaatgaatgggc

SEQ ID NO: 6612 - DNA, 22 bp, Artificial Sequence
  Description of Artificial Sequence: Synthetic oligonucleotide
ttccttaagtacttcctgggca

SEQ ID NO: 6613 - DNA, 22 bp, Artificial Sequence
  Description of Artificial Sequence: Synthetic oligonucleotide
attgtggttgatgtaggttgcc

SEQ ID NO: 6614 - DNA, 22 bp, Artificial Sequence
  Description of Artificial Sequence: Synthetic oligonucleotide
cttgaggatgaggtatttgccc

SEQ ID NO: 6615 - DNA, 22 bp, Artificial Sequence
  Description of Artificial Sequence: Synthetic oligonucleotide
tattgcaacactgtactcaggg

SEQ ID NO: 6616 - DNA, 22 bp, Artificial Sequence
  Description of Artificial Sequence: Synthetic oligonucleotide
ttgtttaagatcatctccacct

SEQ ID NO: 6617 - DNA, 22 bp, Artificial Sequence
  Description of Artificial Sequence: Synthetic oligonucleotide
aattacttccatcctttggcga

SEQ ID NO: 6618 - DNA, 22 bp, Artificial Sequence
  Description of Artificial Sequence: Synthetic oligonucleotide
tttattctacatggagatgcca

SEQ ID NO: 6619 - DNA, 22 bp, Artificial Sequence
  Description of Artificial Sequence: Synthetic oligonucleotide
ttctccttcacttctgagtcct

SEQ ID NO: 6620 - DNA, 22 bp, Artificial Sequence
  Description of Artificial Sequence: Synthetic oligonucleotide
tcttgtactctgtcactgtctt

SEQ ID NO: 6621 - DNA, 22 bp, Artificial Sequence
  Description of Artificial Sequence: Synthetic oligonucleotide
tttgggtctcaaagcgtaggcc

SEQ ID NO: 6622 - DNA, 22 bp, Artificial Sequence
  Description of Artificial Sequence: Synthetic oligonucleotide
ttagtgagagagatccttgggc

SEQ ID NO: 6623 - DNA, 22 bp, Artificial Sequence
  Description of Artificial Sequence: Synthetic oligonucleotide
aacttccatcagtttaggagtc

SEQ ID NO: 6624 - DNA, 22 bp, Artificial Sequence
  Description of Artificial Sequence: Synthetic oligonucleotide
attgtgcagaatcttgttccgg

SEQ ID NO: 6625 - DNA, 22 bp, Artificial Sequence
  Description of Artificial Sequence: Synthetic oligonucleotide
atactcattcacaaattcaccc

SEQ ID NO: 6626 - DNA, 22 bp, Artificial Sequence
  Description of Artificial Sequence: Synthetic oligonucleotide
ttgccacattggtttatgaggg

SEQ ID NO: 6627 - DNA, 22 bp, Artificial Sequence
  Description of Artificial Sequence: Synthetic oligonucleotide
atcttatagtaatcagggaggt

SEQ ID NO: 6628 - DNA, 22 bp, Artificial Sequence
  Description of Artificial Sequence: Synthetic oligonucleotide
aacacaacatagcgacaggccc

SEQ ID NO: 6629 - DNA, 22 bp, Artificial Sequence
  Description of Artificial Sequence: Synthetic oligonucleotide
ttatgatgtcaatctttcgcca

SEQ ID NO: 6630 - DNA, 22 bp, Artificial Sequence
  Description of Artificial Sequence: Synthetic oligonucleotide
atacctcatcagaatggtagga

SEQ ID NO: 6631 - DNA, 22 bp, Artificial Sequence
  Description of Artificial Sequence: Synthetic oligonucleotide
attcagcacagatcttggtcgt

SEQ ID NO: 6632 - DNA, 22 bp, Artificial Sequence
  Description of Artificial Sequence: Synthetic oligonucleotide
tatgttcttgtggcgcaggcgt

SEQ ID NO: 6633 - DNA, 22 bp, Artificial Sequence
  Description of Artificial Sequence: Synthetic oligonucleotide
tatttctccaaataaagcagct

SEQ ID NO: 6634 - DNA, 22 bp, Artificial Sequence
  Description of Artificial Sequence: Synthetic oligonucleotide
tttcagtataattgcccaacct

SEQ ID NO: 6635 - DNA, 22 bp, Artificial Sequence
  Description of Artificial Sequence: Synthetic oligonucleotide
tagatatgaaatattcatgcca

SEQ ID NO: 6636 - DNA, 22 bp, Artificial Sequence
  Description of Artificial Sequence: Synthetic oligonucleotide
atttctcatttctggatctcgt

SEQ ID NO: 6637 - DNA, 22 bp, Artificial Sequence
  Description of Artificial Sequence: Synthetic oligonucleotide
tttcagtacttgagagtgagga

SEQ ID NO: 6638 - DNA, 22 bp, Artificial Sequence
  Description of Artificial Sequence: Synthetic oligonucleotide
ttaagggacccttgcatagcca

SEQ ID NO: 6639 - DNA, 22 bp, Artificial Sequence
  Description of Artificial Sequence: Synthetic oligonucleotide
tatccttaagctcttcataggt

SEQ ID NO: 6640 - DNA, 22 bp, Artificial Sequence
  Description of Artificial Sequence: Synthetic oligonucleotide
atcagtgacctcagatataggc

SEQ ID NO: 6641 - DNA, 22 bp, Artificial Sequence
  Description of Artificial Sequence: Synthetic oligonucleotide
ttcccgtaaggcttattcacct

SEQ ID NO: 6642 - DNA, 22 bp, Artificial Sequence
  Description of Artificial Sequence: Synthetic oligonucleotide
aattgacagcattacctcagga

SEQ ID NO: 6643 - DNA, 22 bp, Artificial Sequence
  Description of Artificial Sequence: Synthetic oligonucleotide
tttgttcaggctggagggcgcc

SEQ ID NO: 6644 - DNA, 22 bp, Artificial Sequence
  Description of Artificial Sequence: Synthetic oligonucleotide
attacataagcttaggaaagga

SEQ ID NO: 6645 - DNA, 22 bp, Artificial Sequence
  Description of Artificial Sequence: Synthetic oligonucleotide
atgctattacggttgatgccgg

SEQ ID NO: 6646 - DNA, 22 bp, Artificial Sequence
  Description of Artificial Sequence: Synthetic oligonucleotide
attaaccaggatattgtctggc

SEQ ID NO: 6647 - DNA, 22 bp, Artificial Sequence
  Description of Artificial Sequence: Synthetic oligonucleotide
aataaatcacatggtgacagct

SEQ ID NO: 6648 - DNA, 22 bp, Artificial Sequence
  Description of Artificial Sequence: Synthetic oligonucleotide
tttgagaatgtcagctagtgcg

SEQ ID NO: 6649 - DNA, 22 bp, Artificial Sequence
  Description of Artificial Sequence: Synthetic oligonucleotide
tataggtcactctctcagacgt

SEQ ID NO: 6650 - DNA, 22 bp, Artificial Sequence
  Description of Artificial Sequence: Synthetic oligonucleotide
ttatcttcccagttcagctccc

SEQ ID NO: 6651 - DNA, 22 bp, Artificial Sequence
  Description of Artificial Sequence: Synthetic oligonucleotide
attaaggtgctccaaataaggc

SEQ ID NO: 6652 - DNA, 22 bp, Artificial Sequence
  Description of Artificial Sequence: Synthetic oligonucleotide
tttgttgaacctctggtgacca

SEQ ID NO: 6653 - DNA, 22 bp, Artificial Sequence
  Description of Artificial Sequence: Synthetic oligonucleotide
atttggtacaagcaaggtggct

SEQ ID NO: 6654 - DNA, 22 bp, Artificial Sequence
  Description of Artificial Sequence: Synthetic oligonucleotide
taaattaaataagtctccaggc

SEQ ID NO: 6655 - DNA, 22 bp, Artificial Sequence
  Description of Artificial Sequence: Synthetic oligonucleotide
aacatcttcaggatcaggtcct

SEQ ID NO: 6656 - DNA, 22 bp, Artificial Sequence
  Description of Artificial Sequence: Synthetic oligonucleotide
tttagctgaaacaggatctcgt

SEQ ID NO: 6657 - DNA, 22 bp, Artificial Sequence
  Description of Artificial Sequence: Synthetic oligonucleotide
tacattcatgatataactgccg

SEQ ID NO: 6658 - DNA, 22 bp, Artificial Sequence
  Description of Artificial Sequence: Synthetic oligonucleotide
ttgttaactgcacttgtatgct

SEQ ID NO: 6659 - DNA, 22 bp, Artificial Sequence
  Description of Artificial Sequence: Synthetic oligonucleotide
taatactgcatcttctccacgc

SEQ ID NO: 6660 - DNA, 22 bp, Artificial Sequence
  Description of Artificial Sequence: Synthetic oligonucleotide
attataaatggtctggctgcgt

SEQ ID NO: 6661 - DNA, 22 bp, Artificial Sequence
  Description of Artificial Sequence: Synthetic oligonucleotide
atatccgctgtgtagatctgga

SEQ ID NO: 6662 - DNA, 22 bp, Artificial Sequence
  Description of Artificial Sequence: Synthetic oligonucleotide
ttctttcatcctgccatgagcc

SEQ ID NO: 6663 - DNA, 22 bp, Artificial Sequence
  Description of Artificial Sequence: Synthetic oligonucleotide
tttccaggtaccaagagttccc

SEQ ID NO: 6664 - DNA, 22 bp, Artificial Sequence
  Description of Artificial Sequence: Synthetic oligonucleotide
ataaactccacctccatgaggc

SEQ ID NO: 6665 - DNA, 22 bp, Artificial Sequence
  Description of Artificial Sequence: Synthetic oligonucleotide
tttgtagaacttcatcacaggt

SEQ ID NO: 6666 - DNA, 22 bp, Artificial Sequence
  Description of Artificial Sequence: Synthetic oligonucleotide
tttgtcagcgggattcatgccc

SEQ ID NO: 6667 - DNA, 22 bp, Artificial Sequence
  Description of Artificial Sequence: Synthetic oligonucleotide
taacatgctcatgatttcggca

SEQ ID NO: 6668 - DNA, 22 bp, Artificial Sequence
  Description of Artificial Sequence: Synthetic oligonucleotide
aatatcagccaaatcttcagca

SEQ ID NO: 6669 - DNA, 22 bp, Artificial Sequence
  Description of Artificial Sequence: Synthetic oligonucleotide
atttcttatactgatcccaggc

SEQ ID NO: 6670 - DNA, 22 bp, Artificial Sequence
  Description of Artificial Sequence: Synthetic oligonucleotide
aagactcatcatggtatcccga

SEQ ID NO: 6671 - DNA, 22 bp, Artificial Sequence
  Description of Artificial Sequence: Synthetic oligonucleotide
tttccacacaagggtagaaggc

SEQ ID NO: 6672 - DNA, 22 bp, Artificial Sequence
  Description of Artificial Sequence: Synthetic oligonucleotide
ttgcaatagccagtaagttggc

SEQ ID NO: 6673 - DNA, 22 bp, Artificial Sequence
  Description of Artificial Sequence: Synthetic oligonucleotide
aatcgacagtactgacatcggt

SEQ ID NO: 6674 - DNA, 22 bp, Artificial Sequence
  Description of Artificial Sequence: Synthetic oligonucleotide
aaggaaataaataaccagaggg

SEQ ID NO: 6675 - DNA, 22 bp, Artificial Sequence
  Description of Artificial Sequence: Synthetic oligonucleotide
ttacatggttaggatgccagga

SEQ ID NO: 6676 - DNA, 22 bp, Artificial Sequence
  Description of Artificial Sequence: Synthetic oligonucleotide
atgatttgcttgaatgatggcc

SEQ ID NO: 6677 - DNA, 22 bp, Artificial Sequence
  Description of Artificial Sequence: Synthetic oligonucleotide
tttgcagtttggtctcagtccg

SEQ ID NO: 6678 - DNA, 22 bp, Artificial Sequence
  Description of Artificial Sequence: Synthetic oligonucleotide
tttcatcataattgttggtgcc

SEQ ID NO: 6679 - DNA, 22 bp, Artificial Sequence
  Description of Artificial Sequence: Synthetic oligonucleotide
atactaatggaatcacttcgct

SEQ ID NO: 6680 - DNA, 22 bp, Artificial Sequence
  Description of Artificial Sequence: Synthetic oligonucleotide
aaggtctcttaggtgataggct

SEQ ID NO: 6681 - DNA, 22 bp, Artificial Sequence
  Description of Artificial Sequence: Synthetic oligonucleotide
taacaccttcatacagttcccg

SEQ ID NO: 6682 - DNA, 22 bp, Artificial Sequence
  Description of Artificial Sequence: Synthetic oligonucleotide
ttagtgaggacaagcctcacgt

SEQ ID NO: 6683 - DNA, 22 bp, Artificial Sequence
  Description of Artificial Sequence: Synthetic oligonucleotide
atattccacttggtgccaggct

SEQ ID NO: 6684 - DNA, 22 bp, Artificial Sequence
  Description of Artificial Sequence: Synthetic oligonucleotide
taaaccaaatattctgagggcc

SEQ ID NO: 6685 - DNA, 22 bp, Artificial Sequence
  Description of Artificial Sequence: Synthetic oligonucleotide
tagtcttagcaatgaaagacca

SEQ ID NO: 6686 - DNA, 22 bp, Artificial Sequence
  Description of Artificial Sequence: Synthetic oligonucleotide
ttagacaaggagaatagcccgt

SEQ ID NO: 6687 - DNA, 22 bp, Artificial Sequence
  Description of Artificial Sequence: Synthetic oligonucleotide
atacgcaaaggctggagaagca

SEQ ID NO: 6688 - DNA, 22 bp, Artificial Sequence
  Description of Artificial Sequence: Synthetic oligonucleotide
ttaaggtatgcagtgacagcca

SEQ ID NO: 6689 - DNA, 22 bp, Artificial Sequence
  Description of Artificial Sequence: Synthetic oligonucleotide
tttggtgtagaaattataagcc

SEQ ID NO: 6690 - DNA, 22 bp, Artificial Sequence
  Description of Artificial Sequence: Synthetic oligonucleotide
ttaagacaccagtttaaatcca

SEQ ID NO: 6691 - DNA, 22 bp, Artificial Sequence
  Description of Artificial Sequence: Synthetic oligonucleotide
tttcatgatgttcaactgcggg

SEQ ID NO: 6692 - DNA, 22 bp, Artificial Sequence
  Description of Artificial Sequence: Synthetic oligonucleotide
atctgctgtgatgtttaagcct

SEQ ID NO: 6693 - DNA, 22 bp, Artificial Sequence
  Description of Artificial Sequence: Synthetic oligonucleotide
tattccgagctgtatgtctgcg

SEQ ID NO: 6694 - DNA, 22 bp, Artificial Sequence
  Description of Artificial Sequence: Synthetic oligonucleotide
tttcaacaccaagaacaaagcc

SEQ ID NO: 6695 - DNA, 22 bp, Artificial Sequence
  Description of Artificial Sequence: Synthetic oligonucleotide
atttggtacacgcaggaaggct

SEQ ID NO: 6696 - DNA, 22 bp, Artificial Sequence
  Description of Artificial Sequence: Synthetic oligonucleotide
ttagcatttgttcttctgccct

SEQ ID NO: 6697 - DNA, 22 bp, Artificial Sequence
  Description of Artificial Sequence: Synthetic oligonucleotide
ttattgtgccatctggagtgct

SEQ ID NO: 6698 - DNA, 22 bp, Artificial Sequence
  Description of Artificial Sequence: Synthetic oligonucleotide
ttagtacgacggagagattccc

SEQ ID NO: 6699 - DNA, 22 bp, Artificial Sequence
  Description of Artificial Sequence: Synthetic oligonucleotide
aatttctgggatcatatcagca

SEQ ID NO: 6700 - DNA, 22 bp, Artificial Sequence
  Description of Artificial Sequence: Synthetic oligonucleotide
tttccttctactgaacacagca

SEQ ID NO: 6701 - DNA, 22 bp, Artificial Sequence
  Description of Artificial Sequence: Synthetic oligonucleotide
tttatgacctttatactctcgt

SEQ ID NO: 6702 - DNA, 22 bp, Artificial Sequence
  Description of Artificial Sequence: Synthetic oligonucleotide
attgagaaaggctaactctggg

SEQ ID NO: 6703 - DNA, 22 bp, Artificial Sequence
  Description of Artificial Sequence: Synthetic oligonucleotide
atatcgtagccttgaatttgga

SEQ ID NO: 6704 - DNA, 22 bp, Artificial Sequence
  Description of Artificial Sequence: Synthetic oligonucleotide
tttcactgttatcttctcagga

SEQ ID NO: 6705 - DNA, 22 bp, Artificial Sequence
  Description of Artificial Sequence: Synthetic oligonucleotide
atttccaagtaggcgataacgc

SEQ ID NO: 6706 - DNA, 22 bp, Artificial Sequence
  Description of Artificial Sequence: Synthetic oligonucleotide
aatctgcctctgaggcaaacca

SEQ ID NO: 6707 - DNA, 22 bp, Artificial Sequence
  Description of Artificial Sequence: Synthetic oligonucleotide
ttcaggagggatagatgctggg

SEQ ID NO: 6708 - DNA, 22 bp, Artificial Sequence
  Description of Artificial Sequence: Synthetic oligonucleotide
tttgtggacggatctctgtggg

SEQ ID NO: 6709 - DNA, 22 bp, Artificial Sequence
  Description of Artificial Sequence: Synthetic oligonucleotide
attatccaaggcctgaggtgga

SEQ ID NO: 6710 - DNA, 22 bp, Artificial Sequence
  Description of Artificial Sequence: Synthetic oligonucleotide
ataggagaaggcatggtgagcc

SEQ ID NO: 6711 - DNA, 22 bp, Artificial Sequence
  Description of Artificial Sequence: Synthetic oligonucleotide
ttcgctttccatctggtgacct

SEQ ID NO: 6712 - DNA, 22 bp, Artificial Sequence
  Description of Artificial Sequence: Synthetic oligonucleotide
ttaacaatggcgcgcatgacgc

SEQ ID NO: 6713 - DNA, 22 bp, Artificial Sequence
  Description of Artificial Sequence: Synthetic oligonucleotide
atacaatttcacattgccaccg

SEQ ID NO: 6714 - DNA, 22 bp, Artificial Sequence
  Description of Artificial Sequence: Synthetic oligonucleotide
aactgttcaaacatggtgccca

SEQ ID NO: 6715 - DNA, 22 bp, Artificial Sequence
  Description of Artificial Sequence: Synthetic oligonucleotide
atatcacatcctccactgtggg

SEQ ID NO: 6716 - DNA, 22 bp, Artificial Sequence
  Description of Artificial Sequence: Synthetic oligonucleotide
ttatactttgcagcaattaggc

SEQ ID NO: 6717 - DNA, 22 bp, Artificial Sequence
  Description of Artificial Sequence: Synthetic oligonucleotide
ttgccatgtctgatttgtaggt

SEQ ID NO: 6718 - DNA, 22 bp, Artificial Sequence
  Description of Artificial Sequence: Synthetic oligonucleotide
ttggattatctctaaaccacca

SEQ ID NO: 6719 - DNA, 22 bp, Artificial Sequence
  Description of Artificial Sequence: Synthetic oligonucleotide
ttgtctttcctgtcaagatcgc

SEQ ID NO: 6720 - DNA, 22 bp, Artificial Sequence
  Description of Artificial Sequence: Synthetic oligonucleotide
tttcagccttagaatccgtggc

SEQ ID NO: 6721 - DNA, 22 bp, Artificial Sequence
  Description of Artificial Sequence: Synthetic oligonucleotide
ttcctctgctcgatcatgtgcg

SEQ ID NO: 6722 - DNA, 22 bp, Artificial Sequence
  Description of Artificial Sequence: Synthetic oligonucleotide
attctgcagtaaggaacgtggc

SEQ ID NO: 6723 - DNA, 22 bp, Artificial Sequence
  Description of Artificial Sequence: Synthetic oligonucleotide
attaccaattatatttgctcca

SEQ ID NO: 6724 - DNA, 22 bp, Artificial Sequence
  Description of Artificial Sequence: Synthetic oligonucleotide
atgatgcacttggtagccagct

SEQ ID NO: 6725 - DNA, 22 bp, Artificial Sequence
  Description of Artificial Sequence: Synthetic oligonucleotide
tatttgagagttataatctgca

SEQ ID NO: 6726 - DNA, 22 bp, Artificial Sequence
  Description of Artificial Sequence: Synthetic oligonucleotide
tatcatccatgctgactgtgcc

SEQ ID NO: 6727 - DNA, 22 bp, Artificial Sequence
  Description of Artificial Sequence: Synthetic oligonucleotide
tttctggttgcatgaaatggct

SEQ ID NO: 6728 - DNA, 22 bp, Artificial Sequence
  Description of Artificial Sequence: Synthetic oligonucleotide
ttagcaaagtcaactatctcct

SEQ ID NO: 6729 - DNA, 22 bp, Artificial Sequence
  Description of Artificial Sequence: Synthetic oligonucleotide
aagtgctatataagtatgagcc

SEQ ID NO: 6730 - DNA, 22 bp, Artificial Sequence
  Description of Artificial Sequence: Synthetic oligonucleotide
atccttgggaacatgtagggct

SEQ ID NO: 6731 - DNA, 22 bp, Artificial Sequence
  Description of Artificial Sequence: Synthetic oligonucleotide
ttgaagtgccataatagaggca

SEQ ID NO: 6732 - DNA, 22 bp, Artificial Sequence
  Description of Artificial Sequence: Synthetic oligonucleotide
ttgatgatgcacttggtagcca

SEQ ID NO: 6733 - DNA, 22 bp, Artificial Sequence
  Description of Artificial Sequence: Synthetic oligonucleotide
ttatgtacatgtggaaggaggg

SEQ ID NO: 6734 - DNA, 22 bp, Artificial Sequence
  Description of Artificial Sequence: Synthetic oligonucleotide
ttatatttgctccaggaaagct

SEQ ID NO: 6735 - DNA, 22 bp, Artificial Sequence
  Description of Artificial Sequence: Synthetic oligonucleotide
ttatctgttaggagctgcaggt

SEQ ID NO: 6736 - DNA, 22 bp, Artificial Sequence
  Description of Artificial Sequence: Synthetic oligonucleotide
ttgtatttctgctgggtgggct

SEQ ID NO: 6737 - DNA, 22 bp, Artificial Sequence
  Description of Artificial Sequence: Synthetic oligonucleotide
ttaataatgcacttggtggcca

SEQ ID NO: 6738 - DNA, 22 bp, Artificial Sequence
  Description of Artificial Sequence: Synthetic oligonucleotide
atctgaaacagaaatagtgcct

SEQ ID NO: 6739 - DNA, 22 bp, Artificial Sequence
  Description of Artificial Sequence: Synthetic oligonucleotide
ataaacctcaaagacgggagga

SEQ ID NO: 6740 - DNA, 22 bp, Artificial Sequence
  Description of Artificial Sequence: Synthetic oligonucleotide
aatccatcaaacacaatttggc

SEQ ID NO: 6741 - DNA, 22 bp, Artificial Sequence
  Description of Artificial Sequence: Synthetic oligonucleotide
atctagaaccaagtccatggcc

SEQ ID NO: 6742 - DNA, 22 bp, Artificial Sequence
  Description of Artificial Sequence: Synthetic oligonucleotide
atctgcctaaagagcagctcgt

SEQ ID NO: 6743 - DNA, 22 bp, Artificial Sequence
  Description of Artificial Sequence: Synthetic oligonucleotide
ttgaggagagttacttggtcgt

SEQ ID NO: 6744 - DNA, 22 bp, Artificial Sequence
  Description of Artificial Sequence: Synthetic oligonucleotide
atcatgcccagttgttccgggc

SEQ ID NO: 6745 - DNA, 22 bp, Artificial Sequence
  Description of Artificial Sequence: Synthetic oligonucleotide
atctcaatgtacaaacagagcc

SEQ ID NO: 6746 - DNA, 22 bp, Artificial Sequence
  Description of Artificial Sequence: Synthetic oligonucleotide
tttctcgtgatacttcaatggg

SEQ ID NO: 6747 - DNA, 22 bp, Artificial Sequence
  Description of Artificial Sequence: Synthetic oligonucleotide
atgatagggcgaaagaagaggt

SEQ ID NO: 6748 - DNA, 22 bp, Artificial Sequence
  Description of Artificial Sequence: Synthetic oligonucleotide
ttctaggaggcagccaccaggc

SEQ ID NO: 6749 - DNA, 22 bp, Artificial Sequence
  Description of Artificial Sequence: Synthetic oligonucleotide
taacctgtaggtgtcatctgga

SEQ ID NO: 6750 - DNA, 22 bp, Artificial Sequence
  Description of Artificial Sequence: Synthetic oligonucleotide
atttcatcaaatagctcttggc

SEQ ID NO: 6751 - DNA, 22 bp, Artificial Sequence
  Description of Artificial Sequence: Synthetic oligonucleotide
aagtaaattatcagtaagtccc

SEQ ID NO: 6752 - DNA, 22 bp, Artificial Sequence
  Description of Artificial Sequence: Synthetic oligonucleotide
tactgaatgagagttatctggt

SEQ ID NO: 6753 - DNA, 22 bp, Artificial Sequence
  Description of Artificial Sequence: Synthetic oligonucleotide
tttggttacagaaaggcatgcc

SEQ ID NO: 6754 - DNA, 22 bp, Artificial Sequence
  Description of Artificial Sequence: Synthetic oligonucleotide
atggatgaacagatgagctgga

SEQ ID NO: 6755 - DNA, 22 bp, Artificial Sequence
  Description of Artificial Sequence: Synthetic oligonucleotide
ttcagcctgcatactgatggcc

SEQ ID NO: 6756 - DNA, 22 bp, Artificial Sequence
  Description of Artificial Sequence: Synthetic oligonucleotide
atcttcttgagtatgctgggca

SEQ ID NO: 6757 - DNA, 22 bp, Artificial Sequence
  Description of Artificial Sequence: Synthetic oligonucleotide
ttgttcgtagtgtatttgccca

SEQ ID NO: 6758 - DNA, 22 bp, Artificial Sequence
  Description of Artificial Sequence: Synthetic oligonucleotide
ttcaatcaacatgggcgtgccc

SEQ ID NO: 6759 - DNA, 22 bp, Artificial Sequence
  Description of Artificial Sequence: Synthetic oligonucleotide
atacaagaaccgttctgtccgt

SEQ ID NO: 6760 - DNA, 22 bp, Artificial Sequence
  Description of Artificial Sequence: Synthetic oligonucleotide
atttgctccaggaaagcttgcc

SEQ ID NO: 6761 - DNA, 22 bp, Artificial Sequence
  Description of Artificial Sequence: Synthetic oligonucleotide
tattgacagcggtttcggtggt

SEQ ID NO: 6762 - DNA, 22 bp, Artificial Sequence
  Description of Artificial Sequence: Synthetic oligonucleotide
ttgttcaaagattcacttaggt

SEQ ID NO: 6763 - DNA, 22 bp, Artificial Sequence
  Description of Artificial Sequence: Synthetic oligonucleotide
ttactcatggttatcttcaggt

SEQ ID NO: 6764 - DNA, 22 bp, Artificial Sequence
  Description of Artificial Sequence: Synthetic oligonucleotide
atatattggtaatgtggaggca

SEQ ID NO: 6765 - DNA, 22 bp, Artificial Sequence
  Description of Artificial Sequence: Synthetic oligonucleotide
atttagtattagatcaggtgca

SEQ ID NO: 6766 - DNA, 22 bp, Artificial Sequence
  Description of Artificial Sequence: Synthetic oligonucleotide
ttcaattgtgtagcgaagaggc

SEQ ID NO: 6767 - DNA, 22 bp, Artificial Sequence
  Description of Artificial Sequence: Synthetic oligonucleotide
tttcaattacagacaataaggt

SEQ ID NO: 6768 - DNA, 22 bp, Artificial Sequence
  Description of Artificial Sequence: Synthetic oligonucleotide
aatctaacagtcctgttgacct

SEQ ID NO: 6769 - DNA, 22 bp, Artificial Sequence
  Description of Artificial Sequence: Synthetic oligonucleotide
tttaatacccactgggaatccg

SEQ ID NO: 6770 - DNA, 22 bp, Artificial Sequence
  Description of Artificial Sequence: Synthetic oligonucleotide
aatcttcttgagtatgctgggc

SEQ ID NO: 6771 - DNA, 22 bp, Artificial Sequence
  Description of Artificial Sequence: Synthetic oligonucleotide
ttgatttaggaagttaattgct

SEQ ID NO: 6772 - DNA, 22 bp, Artificial Sequence
  Description of Artificial Sequence: Synthetic oligonucleotide
tttcaatctggcttgtgctggt

SEQ ID NO: 6773 - DNA, 22 bp, Artificial Sequence
  Description of Artificial Sequence: Synthetic oligonucleotide
aagatctctcgatgggcccggg

SEQ ID NO: 6774 - DNA, 22 bp, Artificial Sequence
  Description of Artificial Sequence: Synthetic oligonucleotide
atctttattcatcaaggaggcc

SEQ ID NO: 6775 - DNA, 22 bp, Artificial Sequence
  Description of Artificial Sequence: Synthetic oligonucleotide
taaaggcagagagtgacttgcc

SEQ ID NO: 6776 - DNA, 22 bp, Artificial Sequence
  Description of Artificial Sequence: Synthetic oligonucleotide
tttgtcctgcagacgcagtgca

SEQ ID NO: 6777 - DNA, 22 bp, Artificial Sequence
  Description of Artificial Sequence: Synthetic oligonucleotide
attacagacaataaggtcaccc

SEQ ID NO: 6778 - DNA, 22 bp, Artificial Sequence
  Description of Artificial Sequence: Synthetic oligonucleotide
atttgtcctggcagacgaagca

SEQ ID NO: 6779 - DNA, 22 bp, Artificial Sequence
  Description of Artificial Sequence: Synthetic oligonucleotide
ttgaacaaggtcaaaggaggca

SEQ ID NO: 6780 - DNA, 22 bp, Artificial Sequence
  Description of Artificial Sequence: Synthetic oligonucleotide
tactcaactgacttatggcgct

SEQ ID NO: 6781 - DNA, 22 bp, Artificial Sequence
  Description of Artificial Sequence: Synthetic oligonucleotide
tttgaattgcagaggaaatggt

SEQ ID NO: 6782 - DNA, 22 bp, Artificial Sequence
  Description of Artificial Sequence: Synthetic oligonucleotide
ttcttgttccggtcatttcgca

SEQ ID NO: 6783 - DNA, 22 bp, Artificial Sequence
  Description of Artificial Sequence: Synthetic oligonucleotide
ttaatacccactgggaatccgc

SEQ ID NO: 6784 - DNA, 22 bp, Artificial Sequence
  Description of Artificial Sequence: Synthetic oligonucleotide
atcttctgaggtaatgactcga

SEQ ID NO: 6785 - DNA, 22 bp, Artificial Sequence
  Description of Artificial Sequence: Synthetic oligonucleotide
ttcctcttaaggaaggacagga

SEQ ID NO: 6786 - DNA, 22 bp, Artificial Sequence
  Description of Artificial Sequence: Synthetic oligonucleotide
tatccactaactggaagctggt

SEQ ID NO: 6787 - DNA, 22 bp, Artificial Sequence
  Description of Artificial Sequence: Synthetic oligonucleotide
atataaacccatggactcagct

SEQ ID NO: 6788 - DNA, 22 bp, Artificial Sequence
  Description of Artificial Sequence: Synthetic oligonucleotide
tatcttctcccatcattaagga

SEQ ID NO: 6789 - DNA, 22 bp, Artificial Sequence
  Description of Artificial Sequence: Synthetic oligonucleotide
attctgataaatcttagctgga

SEQ ID NO: 6790 - DNA, 22 bp, Artificial Sequence
  Description of Artificial Sequence: Synthetic oligonucleotide
ttctaaggcgacatgctgggca

SEQ ID NO: 6791 - DNA, 22 bp, Artificial Sequence
  Description of Artificial Sequence: Synthetic oligonucleotide
tagaattgctggatatgctggg

SEQ ID NO: 6792 - DNA, 22 bp, Artificial Sequence
  Description of Artificial Sequence: Synthetic oligonucleotide
aataacacagttcttatctcgg

SEQ ID NO: 6793 - DNA, 22 bp, Artificial Sequence
  Description of Artificial Sequence: Synthetic oligonucleotide
ttgtttatggaagcaaacagcc

SEQ ID NO: 6794 - DNA, 22 bp, Artificial Sequence
  Description of Artificial Sequence: Synthetic oligonucleotide
atacaaagcaactataattgga

SEQ ID NO: 6795 - DNA, 22 bp, Artificial Sequence
  Description of Artificial Sequence: Synthetic oligonucleotide
ataataaggtggagatgcaggc

SEQ ID NO: 6796 - DNA, 22 bp, Artificial Sequence
  Description of Artificial Sequence: Synthetic oligonucleotide
taagaacagcagtctggaggca

SEQ ID NO: 6797 - DNA, 22 bp, Artificial Sequence
  Description of Artificial Sequence: Synthetic oligonucleotide
aagattaagcgatatatatgct

SEQ ID NO: 6798 - DNA, 22 bp, Artificial Sequence
  Description of Artificial Sequence: Synthetic oligonucleotide
taaggtatgcatactcatagcc

SEQ ID NO: 6799 - DNA, 22 bp, Artificial Sequence
  Description of Artificial Sequence: Synthetic oligonucleotide
attattgggactggagactgga

SEQ ID NO: 6800 - DNA, 22 bp, Artificial Sequence
  Description of Artificial Sequence: Synthetic oligonucleotide
atcttagcaaagccaatgacct

SEQ ID NO: 6801 - DNA, 22 bp, Artificial Sequence
  Description of Artificial Sequence: Synthetic oligonucleotide
aattcaacactcagtgcccggg

SEQ ID NO: 6802 - DNA, 22 bp, Artificial Sequence
  Description of Artificial Sequence: Synthetic oligonucleotide
taataaggtggagatgcaggct

SEQ ID NO: 6803 - DNA, 22 bp, Artificial Sequence
  Description of Artificial Sequence: Synthetic oligonucleotide
aacctcaaagacgggaggagca

SEQ ID NO: 6804 - DNA, 22 bp, Artificial Sequence
  Description of Artificial Sequence: Synthetic oligonucleotide
taatacccactgggaatccgct

SEQ ID NO: 6805 - DNA, 22 bp, Artificial Sequence
  Description of Artificial Sequence: Synthetic oligonucleotide
atttagggcctcgttatgacgc

SEQ ID NO: 6806 - DNA, 22 bp, Artificial Sequence
  Description of Artificial Sequence: Synthetic oligonucleotide
atttagcaaactcggttatcct

SEQ ID NO: 6807 - DNA, 22 bp, Artificial Sequence
  Description of Artificial Sequence: Synthetic oligonucleotide
tttgcaacctacattgataggg

SEQ ID NO: 6808 - DNA, 22 bp, Artificial Sequence
  Description of Artificial Sequence: Synthetic oligonucleotide
ttcacctagtgggtggagggcg

SEQ ID NO: 6809 - DNA, 22 bp, Artificial Sequence
  Description of Artificial Sequence: Synthetic oligonucleotide
tttcagaatcctcctaactggg

SEQ ID NO: 6810 - DNA, 22 bp, Artificial Sequence
  Description of Artificial Sequence: Synthetic oligonucleotide
tttagctaaggtatcaaatgcc

SEQ ID NO: 6811 - DNA, 22 bp, Artificial Sequence
  Description of Artificial Sequence: Synthetic oligonucleotide
ttaaactatcctggtagctccc

SEQ ID NO: 6812 - DNA, 22 bp, Artificial Sequence
  Description of Artificial Sequence: Synthetic oligonucleotide
tttggaaatcattcagcaggca

SEQ ID NO: 6813 - DNA, 22 bp, Artificial Sequence
  Description of Artificial Sequence: Synthetic oligonucleotide
tactcatagccatctatatccc

SEQ ID NO: 6814 - DNA, 22 bp, Artificial Sequence
  Description of Artificial Sequence: Synthetic oligonucleotide
attgcgaaatttattccagggc

SEQ ID NO: 6815 - DNA, 22 bp, Artificial Sequence
  Description of Artificial Sequence: Synthetic oligonucleotide
tattgatgatgcagtcttggct

SEQ ID NO: 6816 - DNA, 22 bp, Artificial Sequence
  Description of Artificial Sequence: Synthetic oligonucleotide
tatacaagaaccgttctgtccg

SEQ ID NO: 6817 - DNA, 22 bp, Artificial Sequence
  Description of Artificial Sequence: Synthetic oligonucleotide
tttcgatgagcaggttgttgcg

SEQ ID NO: 6818 - DNA, 22 bp, Artificial Sequence
  Description of Artificial Sequence: Synthetic oligonucleotide
ttggcattgatgaatctcagca

SEQ ID NO: 6819 - DNA, 22 bp, Artificial Sequence
  Description of Artificial Sequence: Synthetic oligonucleotide
ttcttccatgatcaaaggtggc

SEQ ID NO: 6820 - DNA, 22 bp, Artificial Sequence
  Description of Artificial Sequence: Synthetic oligonucleotide
atacattggcatttgggatgcg

SEQ ID NO: 6821 - DNA, 22 bp, Artificial Sequence
  Description of Artificial Sequence: Synthetic oligonucleotide
aattattgaggtttaaagaggg

SEQ ID NO: 6822 - DNA, 22 bp, Artificial Sequence
  Description of Artificial Sequence: Synthetic oligonucleotide
ttgtcatgccaacgggagagct

SEQ ID NO: 6823 - DNA, 22 bp, Artificial Sequence
  Description of Artificial Sequence: Synthetic oligonucleotide
ttaaacttggtcacgaggcgga

SEQ ID NO: 6824 - DNA, 22 bp, Artificial Sequence
  Description of Artificial Sequence: Synthetic oligonucleotide
atatagctgggaaatcaatcga

SEQ ID NO: 6825 - DNA, 22 bp, Artificial Sequence
  Description of Artificial Sequence: Synthetic oligonucleotide
tttacatttcagtaaatgtgct

SEQ ID NO: 6826 - DNA, 22 bp, Artificial Sequence
  Description of Artificial Sequence: Synthetic oligonucleotide
ttaaagggtgacatcttctggc

SEQ ID NO: 6827 - DNA, 22 bp, Artificial Sequence
  Description of Artificial Sequence: Synthetic oligonucleotide
tatatagctcatgcacgtgcag

SEQ ID NO: 6828 - DNA, 22 bp, Artificial Sequence
  Description of Artificial Sequence: Synthetic oligonucleotide
tcttgttcagatactttgcctc

SEQ ID NO: 6829 - DNA, 22 bp, Artificial Sequence
  Description of Artificial Sequence: Synthetic oligonucleotide
ttaaagttcaatttcaaacgtc

SEQ ID NO: 6830 - DNA, 22 bp, Artificial Sequence
  Description of Artificial Sequence: Synthetic oligonucleotide
taaacatgaagaggtaggaggt

SEQ ID NO: 6831 - DNA, 22 bp, Artificial Sequence
  Description of Artificial Sequence: Synthetic oligonucleotide
ttcttcaagcaacaaaggtggt

SEQ ID NO: 6832 - DNA, 22 bp, Artificial Sequence
  Description of Artificial Sequence: Synthetic oligonucleotide
ctccagatacagttaagctgct

SEQ ID NO: 6833 - DNA, 22 bp, Artificial Sequence
  Description of Artificial Sequence: Synthetic oligonucleotide
aatgtgaactttaataacaggt

SEQ ID NO: 6834 - DNA, 22 bp, Artificial Sequence
  Description of Artificial Sequence: Synthetic oligonucleotide
aagatgtttccaaagcgatccc

SEQ ID NO: 6835 - DNA, 22 bp, Artificial Sequence
  Description of Artificial Sequence: Synthetic oligonucleotide
ataaccttggctagaaagggca

SEQ ID NO: 6836 - DNA, 22 bp, Artificial Sequence
  Description of Artificial Sequence: Synthetic oligonucleotide
ataaatcttagttatgtgttct

SEQ ID NO: 6837 - DNA, 22 bp, Artificial Sequence
  Description of Artificial Sequence: Synthetic oligonucleotide
ctgattagtggcctgtggccgt

SEQ ID NO: 6838 - DNA, 22 bp, Artificial Sequence
  Description of Artificial Sequence: Synthetic oligonucleotide
atttcctcctgagtactcaggg

SEQ ID NO: 6839 - DNA, 22 bp, Artificial Sequence
  Description of Artificial Sequence: Synthetic oligonucleotide
ttagtgagccaggtaatgaggc

SEQ ID NO: 6840 - DNA, 22 bp, Artificial Sequence
  Description of Artificial Sequence: Synthetic oligonucleotide
atactggagaagttgttaccca

SEQ ID NO: 6841 - DNA, 22 bp, Artificial Sequence
  Description of Artificial Sequence: Synthetic oligonucleotide
ttagagtaatctccaatcagct

SEQ ID NO: 6842 - DNA, 22 bp, Artificial Sequence
  Description of Artificial Sequence: Synthetic oligonucleotide
ttattcttaccacagagtaggt

SEQ ID NO: 6843 - DNA, 22 bp, Artificial Sequence
  Description of Artificial Sequence: Synthetic oligonucleotide
ttgaatacacatgaaatgtgct

SEQ ID NO: 6844 - DNA, 22 bp, Artificial Sequence
  Description of Artificial Sequence: Synthetic oligonucleotide
ttattctggagtgaagaatgct

SEQ ID NO: 6845 - DNA, 22 bp, Artificial Sequence
  Description of Artificial Sequence: Synthetic oligonucleotide
aacttccttgactctctgagcc

SEQ ID NO: 6846 - DNA, 22 bp, Artificial Sequence
  Description of Artificial Sequence: Synthetic oligonucleotide
ttaggactaacttcttgtccct

SEQ ID NO: 6847 - DNA, 22 bp, Artificial Sequence
  Description of Artificial Sequence: Synthetic oligonucleotide
atgtttaatgccattgcctgga

SEQ ID NO: 6848 - DNA, 22 bp, Artificial Sequence
  Description of Artificial Sequence: Synthetic oligonucleotide
taggctttgatgctcatgcggc

SEQ ID NO: 6849 - DNA, 22 bp, Artificial Sequence
  Description of Artificial Sequence: Synthetic oligonucleotide
tttcagtttatcatttgctcct

SEQ ID NO: 6850 - DNA, 22 bp, Artificial Sequence
  Description of Artificial Sequence: Synthetic oligonucleotide
taaatacagagctgagtttcct

SEQ ID NO: 6851 - DNA, 22 bp, Artificial Sequence
  Description of Artificial Sequence: Synthetic oligonucleotide
tttcaatttctgaaatagagga

SEQ ID NO: 6852 - DNA, 22 bp, Artificial Sequence
  Description of Artificial Sequence: Synthetic oligonucleotide
ttaaacatagagcactatgccc

SEQ ID NO: 6853 - DNA, 22 bp, Artificial Sequence
  Description of Artificial Sequence: Synthetic oligonucleotide
atttctgatcccatttctgcct

SEQ ID NO: 6854 - DNA, 22 bp, Artificial Sequence
  Description of Artificial Sequence: Synthetic oligonucleotide
attatcttgaattgactcagct

SEQ ID NO: 6855 - DNA, 22 bp, Artificial Sequence
  Description of Artificial Sequence: Synthetic oligonucleotide
ataggcaaagaaagcatttgcc

SEQ ID NO: 6856 - DNA, 22 bp, Artificial Sequence
  Description of Artificial Sequence: Synthetic oligonucleotide
ttaggagtggagtatacatggg

SEQ ID NO: 6857 - DNA, 22 bp, Artificial Sequence
  Description of Artificial Sequence: Synthetic oligonucleotide
atgatggtctctatgttgcgtt

SEQ ID NO: 6858 - DNA, 22 bp, Artificial Sequence
  Description of Artificial Sequence: Synthetic oligonucleotide
tttagagaaagatctgtgagct

SEQ ID NO: 6859 - DNA, 22 bp, Artificial Sequence
  Description of Artificial Sequence: Synthetic oligonucleotide
atttgtttgatattccacacct

SEQ ID NO: 6860 - DNA, 22 bp, Artificial Sequence
  Description of Artificial Sequence: Synthetic oligonucleotide
atacatcatgaagtcctgagtc

SEQ ID NO: 6861 - DNA, 22 bp, Artificial Sequence
  Description of Artificial Sequence: Synthetic oligonucleotide
attatattcgagaatgtgtcct

SEQ ID NO: 6862 - DNA, 22 bp, Artificial Sequence
  Description of Artificial Sequence: Synthetic oligonucleotide
taaatgaagcacatcatttcct

SEQ ID NO: 6863 - DNA, 22 bp, Artificial Sequence
  Description of Artificial Sequence: Synthetic oligonucleotide
tttcagacccatcttattggcc

SEQ ID NO: 6864 - DNA, 22 bp, Artificial Sequence
  Description of Artificial Sequence: Synthetic oligonucleotide
ttgatttctctcccaattggcc

SEQ ID NO: 6865 - DNA, 22 bp, Artificial Sequence
  Description of Artificial Sequence: Synthetic oligonucleotide
tacatctggtaggttcagtgct

SEQ ID NO: 6866 - DNA, 22 bp, Artificial Sequence
  Description of Artificial Sequence: Synthetic oligonucleotide
atatatgtacacacagttagca

SEQ ID NO: 6867 - DNA, 22 bp, Artificial Sequence
  Description of Artificial Sequence: Synthetic oligonucleotide
ataatcagcaaatgaatgggct

SEQ ID NO: 6868 - DNA, 22 bp, Artificial Sequence
  Description of Artificial Sequence: Synthetic oligonucleotide
attgcagaggaaatggtcaggt

SEQ ID NO: 6869 - DNA, 22 bp, Artificial Sequence
  Description of Artificial Sequence: Synthetic oligonucleotide
atgtatcaacactatcaaggca

SEQ ID NO: 6870 - DNA, 22 bp, Artificial Sequence
  Description of Artificial Sequence: Synthetic oligonucleotide
tttatgtttccgttgatgacct

SEQ ID NO: 6871 - DNA, 22 bp, Artificial Sequence
  Description of Artificial Sequence: Synthetic oligonucleotide
tttaaccagtattctggctgct

SEQ ID NO: 6872 - DNA, 22 bp, Artificial Sequence
  Description of Artificial Sequence: Synthetic oligonucleotide
atctatatccgcatcctcaggg

SEQ ID NO: 6873 - DNA, 22 bp, Artificial Sequence
  Description of Artificial Sequence: Synthetic oligonucleotide
ttaatgaggcgcgtacagagtc

SEQ ID NO: 6874 - DNA, 22 bp, Artificial Sequence
  Description of Artificial Sequence: Synthetic oligonucleotide
aattgagaccagagagtgagca

SEQ ID NO: 6875 - DNA, 22 bp, Artificial Sequence
  Description of Artificial Sequence: Synthetic oligonucleotide
ttacgattccatctcacaaggc

SEQ ID NO: 6876 - DNA, 22 bp, Artificial Sequence
  Description of Artificial Sequence: Synthetic oligonucleotide
ttgtatttaccacaagggccga

SEQ ID NO: 6877 - DNA, 22 bp, Artificial Sequence
  Description of Artificial Sequence: Synthetic oligonucleotide
ttaatgtgtcagcctttaagcc

SEQ ID NO: 6878 - DNA, 22 bp, Artificial Sequence
  Description of Artificial Sequence: Synthetic oligonucleotide
tttcataggcaaccaattagca

SEQ ID NO: 6879 - DNA, 22 bp, Artificial Sequence
  Description of Artificial Sequence: Synthetic oligonucleotide
aatgtgaataacttgctgggtt

SEQ ID NO: 6880 - DNA, 22 bp, Artificial Sequence
  Description of Artificial Sequence: Synthetic oligonucleotide
atctataatgtgaataacttgc

SEQ ID NO: 6881 - DNA, 22 bp, Artificial Sequence
  Description of Artificial Sequence: Synthetic oligonucleotide
atccgtcttgacacttattccc

SEQ ID NO: 6882 - DNA, 22 bp, Artificial Sequence
  Description of Artificial Sequence: Synthetic oligonucleotide
tttatagaacagggcaagggca

SEQ ID NO: 6883 - DNA, 22 bp, Artificial Sequence
  Description of Artificial Sequence: Synthetic oligonucleotide
ataagtgataatattcatccct

SEQ ID NO: 6884 - DNA, 22 bp, Artificial Sequence
  Description of Artificial Sequence: Synthetic oligonucleotide
taaggatctcatggtaaacggc

SEQ ID NO: 6885 - DNA, 22 bp, Artificial Sequence
  Description of Artificial Sequence: Synthetic oligonucleotide
ttaacttgggaagctccttgca

SEQ ID NO: 6886 - DNA, 22 bp, Artificial Sequence
  Description of Artificial Sequence: Synthetic oligonucleotide
tttccaaacagctctctgtcgg

SEQ ID NO: 6887 - DNA, 22 bp, Artificial Sequence
  Description of Artificial Sequence: Synthetic oligonucleotide
ttaattgaattggttggatccc

SEQ ID NO: 6888 - DNA, 22 bp, Artificial Sequence
  Description of Artificial Sequence: Synthetic oligonucleotide
ttaagaaatcttgaggccagcg

SEQ ID NO: 6889 - DNA, 22 bp, Artificial Sequence
  Description of Artificial Sequence: Synthetic oligonucleotide
atgctgatagcaattgattcct

SEQ ID NO: 6890 - DNA, 22 bp, Artificial Sequence
  Description of Artificial Sequence: Synthetic oligonucleotide
taactctatgctcaaaggaggt

SEQ ID NO: 6891 - DNA, 22 bp, Artificial Sequence
  Description of Artificial Sequence: Synthetic oligonucleotide
atgaagatggagagagttagct

SEQ ID NO: 6892 - DNA, 22 bp, Artificial Sequence
  Description of Artificial Sequence: Synthetic oligonucleotide
atacgtagggaaactctctcgg

SEQ ID NO: 6893 - DNA, 22 bp, Artificial Sequence
  Description of Artificial Sequence: Synthetic oligonucleotide
tataaatttcacaactggagga

SEQ ID NO: 6894 - DNA, 22 bp, Artificial Sequence
  Description of Artificial Sequence: Synthetic oligonucleotide
ttcttgctgaacactttcacgt

SEQ ID NO: 6895 - DNA, 22 bp, Artificial Sequence
  Description of Artificial Sequence: Synthetic oligonucleotide
atagacgaagatatcatcacgg

SEQ ID NO: 6896 - DNA, 22 bp, Artificial Sequence
  Description of Artificial Sequence: Synthetic oligonucleotide
tttaaacacctggaagtctgct

SEQ ID NO: 6897 - DNA, 22 bp, Artificial Sequence
  Description of Artificial Sequence: Synthetic oligonucleotide
aatgttgtctcctttgggtcca

SEQ ID NO: 6898 - DNA, 22 bp, Artificial Sequence
  Description of Artificial Sequence: Synthetic oligonucleotide
ctttccagagctaaagaaggcc

SEQ ID NO: 6899 - DNA, 22 bp, Artificial Sequence
  Description of Artificial Sequence: Synthetic oligonucleotide
aattgtgtagcgaagaggcccg

SEQ ID NO: 6900 - DNA, 22 bp, Artificial Sequence
  Description of Artificial Sequence: Synthetic oligonucleotide
atttgatacaagtaaagaaggt

SEQ ID NO: 6901 - DNA, 22 bp, Artificial Sequence
  Description of Artificial Sequence: Synthetic oligonucleotide
ttattcatcttcgtagccagtt

SEQ ID NO: 6902 - DNA, 22 bp, Artificial Sequence
  Description of Artificial Sequence: Synthetic oligonucleotide
atacaagtaaagaaggttagct

SEQ ID NO: 6903 - DNA, 22 bp, Artificial Sequence
  Description of Artificial Sequence: Synthetic oligonucleotide
aatattggtttgggtaggtccc

SEQ ID NO: 6904 - DNA, 22 bp, Artificial Sequence
  Description of Artificial Sequence: Synthetic oligonucleotide
tttaattctctcagggacagga

SEQ ID NO: 6905 - DNA, 22 bp, Artificial Sequence
  Description of Artificial Sequence: Synthetic oligonucleotide
tttaccaagatggaggtgagga

SEQ ID NO: 6906 - DNA, 22 bp, Artificial Sequence
  Description of Artificial Sequence: Synthetic oligonucleotide
atttccaatgaaactacgtcgt

SEQ ID NO: 6907 - DNA, 22 bp, Artificial Sequence
  Description of Artificial Sequence: Synthetic oligonucleotide
tttggtttcaccatagcgaggc

SEQ ID NO: 6908 - DNA, 22 bp, Artificial Sequence
  Description of Artificial Sequence: Synthetic oligonucleotide
aattaccttgttagtatacggc

SEQ ID NO: 6909 - DNA, 22 bp, Artificial Sequence
  Description of Artificial Sequence: Synthetic oligonucleotide
ttaccttgttagtatacggccg

SEQ ID NO: 6910 - DNA, 22 bp, Artificial Sequence
  Description of Artificial Sequence: Synthetic oligonucleotide
atagttgtgcatctttgctggc

SEQ ID NO: 6911 - DNA, 22 bp, Artificial Sequence
  Description of Artificial Sequence: Synthetic oligonucleotide
ttgtagtctgaagtggacacgt

SEQ ID NO: 6912 - DNA, 22 bp, Artificial Sequence
  Description of Artificial Sequence: Synthetic oligonucleotide
aataatattcatttggatggcc

SEQ ID NO: 6913 - DNA, 22 bp, Artificial Sequence
  Description of Artificial Sequence: Synthetic oligonucleotide
aacagcaactatctgatctctc

SEQ ID NO: 6914 - DNA, 22 bp, Artificial Sequence
  Description of Artificial Sequence: Synthetic oligonucleotide
atttcccatcaggagtggagca

SEQ ID NO: 6915 - DNA, 22 bp, Artificial Sequence
  Description of Artificial Sequence: Synthetic oligonucleotide
taagttgaaatgaaaggacgga

SEQ ID NO: 6916 - DNA, 22 bp, Artificial Sequence
  Description of Artificial Sequence: Synthetic oligonucleotide
ataatcatagtggatatagcta

SEQ ID NO: 6917 - DNA, 22 bp, Artificial Sequence
  Description of Artificial Sequence: Synthetic oligonucleotide
tacatttaaccctttgaaaggt

SEQ ID NO: 6918 - DNA, 22 bp, Artificial Sequence
  Description of Artificial Sequence: Synthetic oligonucleotide
tttagatgacagatatgtagat

SEQ ID NO: 6919 - DNA, 22 bp, Artificial Sequence
  Description of Artificial Sequence: Synthetic oligonucleotide
ttgatgaatgacttgccctggg

SEQ ID NO: 6920 - DNA, 22 bp, Artificial Sequence
  Description of Artificial Sequence: Synthetic oligonucleotide
tacacatagaaatgacactcct

SEQ ID NO: 6921 - DNA, 22 bp, Artificial Sequence
  Description of Artificial Sequence: Synthetic oligonucleotide
atatcctttcaataatcctgct

SEQ ID NO: 6922 - DNA, 22 bp, Artificial Sequence
  Description of Artificial Sequence: Synthetic oligonucleotide
tttacattcactcctgtcctgg

SEQ ID NO: 6923 - DNA, 22 bp, Artificial Sequence
  Description of Artificial Sequence: Synthetic oligonucleotide
tttcatctccatttaagatggt

SEQ ID NO: 6924 - DNA, 22 bp, Artificial Sequence
  Description of Artificial Sequence: Synthetic oligonucleotide
ttctcctttcaacccagatgga

SEQ ID NO: 6925 - DNA, 22 bp, Artificial Sequence
  Description of Artificial Sequence: Synthetic oligonucleotide
tatagcactgatggtagcggcc

SEQ ID NO: 6926 - DNA, 22 bp, Artificial Sequence
  Description of Artificial Sequence: Synthetic oligonucleotide
aatcttaaaggagtagtttccc

SEQ ID NO: 6927 - DNA, 22 bp, Artificial Sequence
  Description of Artificial Sequence: Synthetic oligonucleotide
aattgtttccactgtggtccct

SEQ ID NO: 6928 - DNA, 22 bp, Artificial Sequence
  Description of Artificial Sequence: Synthetic oligonucleotide
atattaaattgtgcagcttggc

SEQ ID NO: 6929 - DNA, 22 bp, Artificial Sequence
  Description of Artificial Sequence: Synthetic oligonucleotide
tttcttcacagaagcacatgcc

SEQ ID NO: 6930 - DNA, 22 bp, Artificial Sequence
  Description of Artificial Sequence: Synthetic oligonucleotide
ttctgcagatggaaatattcgg

SEQ ID NO: 6931 - DNA, 22 bp, Artificial Sequence
  Description of Artificial Sequence: Synthetic oligonucleotide
tagaaacaacacttacaatggg

SEQ ID NO: 6932 - DNA, 22 bp, Artificial Sequence
  Description of Artificial Sequence: Synthetic oligonucleotide
atagcttattaatcagaatggc

SEQ ID NO: 6933 - DNA, 22 bp, Artificial Sequence
  Description of Artificial Sequence: Synthetic oligonucleotide
atataagtcccatgaatttggg

SEQ ID NO: 6934 - DNA, 22 bp, Artificial Sequence
  Description of Artificial Sequence: Synthetic oligonucleotide
ataaatgaatgtgatcaacgca

SEQ ID NO: 6935 - DNA, 22 bp, Artificial Sequence
  Description of Artificial Sequence: Synthetic oligonucleotide
atattgttgcattctctgtcct

SEQ ID NO: 6936 - DNA, 22 bp, Artificial Sequence
  Description of Artificial Sequence: Synthetic oligonucleotide
taaatgcagagcaagatgtggc

SEQ ID NO: 6937 - DNA, 22 bp, Artificial Sequence
  Description of Artificial Sequence: Synthetic oligonucleotide
ttatggcacatttcgttcagct

SEQ ID NO: 6938 - DNA, 22 bp, Artificial Sequence
  Description of Artificial Sequence: Synthetic oligonucleotide
atactaggccaatagaatcggt

SEQ ID NO: 6939 - DNA, 22 bp, Artificial Sequence
  Description of Artificial Sequence: Synthetic oligonucleotide
ttcttatctaggtttctggcct

SEQ ID NO: 6940 - DNA, 22 bp, Artificial Sequence
  Description of Artificial Sequence: Synthetic oligonucleotide
tttaatgtaggcgttcttggca

SEQ ID NO: 6941 - DNA, 22 bp, Artificial Sequence
  Description of Artificial Sequence: Synthetic oligonucleotide
ttctggcttcagcagaaatgca

SEQ ID NO: 6942 - DNA, 22 bp, Artificial Sequence
  Description of Artificial Sequence: Synthetic oligonucleotide
tagggaatcttgatcatggcct

SEQ ID NO: 6943 - DNA, 22 bp, Artificial Sequence
  Description of Artificial Sequence: Synthetic oligonucleotide
tatctatttcagtgaagctcct

SEQ ID NO: 6944 - DNA, 22 bp, Artificial Sequence
  Description of Artificial Sequence: Synthetic oligonucleotide
attattagtgtctccagatcca

SEQ ID NO: 6945 - DNA, 22 bp, Artificial Sequence
  Description of Artificial Sequence: Synthetic oligonucleotide
tataggaactccagtgagggct

SEQ ID NO: 6946 - DNA, 22 bp, Artificial Sequence
  Description of Artificial Sequence: Synthetic oligonucleotide
taactcatcaaggtacaaacgg

SEQ ID NO: 6947 - DNA, 22 bp, Artificial Sequence
  Description of Artificial Sequence: Synthetic oligonucleotide
ttaagaggtggcatattcaggt

SEQ ID NO: 6948 - DNA, 22 bp, Artificial Sequence
  Description of Artificial Sequence: Synthetic oligonucleotide
taatagtctttgctaggcggcg

SEQ ID NO: 6949 - DNA, 22 bp, Artificial Sequence
  Description of Artificial Sequence: Synthetic oligonucleotide
ataaaggatgccagtaatagcc

SEQ ID NO: 6950 - DNA, 22 bp, Artificial Sequence
  Description of Artificial Sequence: Synthetic oligonucleotide
tatttacaaaggccagtgtggg

SEQ ID NO: 6951 - DNA, 22 bp, Artificial Sequence
  Description of Artificial Sequence: Synthetic oligonucleotide
tttccttctgcaaatgaagccg

SEQ ID NO: 6952 - DNA, 22 bp, Artificial Sequence
  Description of Artificial Sequence: Synthetic oligonucleotide
ttctagattcatacagcacgca

SEQ ID NO: 6953 - DNA, 22 bp, Artificial Sequence
  Description of Artificial Sequence: Synthetic oligonucleotide
tttccacattaggttggctcgg

SEQ ID NO: 6954 - DNA, 22 bp, Artificial Sequence
  Description of Artificial Sequence: Synthetic oligonucleotide
ataaatacttctctaatgggca

SEQ ID NO: 6955 - DNA, 22 bp, Artificial Sequence
  Description of Artificial Sequence: Synthetic oligonucleotide
tatacctaagggcagagttggt

SEQ ID NO: 6956 - DNA, 22 bp, Artificial Sequence
  Description of Artificial Sequence: Synthetic oligonucleotide
tatttgtgcctcagaatcagtc

SEQ ID NO: 6957 - DNA, 22 bp, Artificial Sequence
  Description of Artificial Sequence: Synthetic oligonucleotide
ttcatctccacgtagaagtcct

SEQ ID NO: 6958 - DNA, 22 bp, Artificial Sequence
  Description of Artificial Sequence: Synthetic oligonucleotide
aactgaaatccttgaggaaggt

SEQ ID NO: 6959 - DNA, 22 bp, Artificial Sequence
  Description of Artificial Sequence: Synthetic oligonucleotide
ttatttgccagcaggatctcca

SEQ ID NO: 6960 - DNA, 22 bp, Artificial Sequence
  Description of Artificial Sequence: Synthetic oligonucleotide
ttatacaaagagttggtcccga

SEQ ID NO: 6961 - DNA, 22 bp, Artificial Sequence
  Description of Artificial Sequence: Synthetic oligonucleotide
atactccttcatgtgcacggcg

SEQ ID NO: 6962 - DNA, 22 bp, Artificial Sequence
  Description of Artificial Sequence: Synthetic oligonucleotide
ttactgttatttacaccctcct

SEQ ID NO: 6963 - DNA, 22 bp, Artificial Sequence
  Description of Artificial Sequence: Synthetic oligonucleotide
aattgggttgaagtacagagcc

SEQ ID NO: 6964 - DNA, 22 bp, Artificial Sequence
  Description of Artificial Sequence: Synthetic oligonucleotide
aatctttctcacagctagcgcg

SEQ ID NO: 6965 - DNA, 22 bp, Artificial Sequence
  Description of Artificial Sequence: Synthetic oligonucleotide
ttaaatcctcacttgagcggcg

SEQ ID NO: 6966 - DNA, 22 bp, Artificial Sequence
  Description of Artificial Sequence: Synthetic oligonucleotide
attaagagagtctgtgctgccc

SEQ ID NO: 6967 - DNA, 22 bp, Artificial Sequence
  Description of Artificial Sequence: Synthetic oligonucleotide
attatgtacacgtgagatggcc

SEQ ID NO: 6968 - DNA, 22 bp, Artificial Sequence
  Description of Artificial Sequence: Synthetic oligonucleotide
atgacacaagagatgttctggt

SEQ ID NO: 6969 - DNA, 22 bp, Artificial Sequence
  Description of Artificial Sequence: Synthetic oligonucleotide
atgtaatctgtgagtagtgcgt

SEQ ID NO: 6970 - DNA, 22 bp, Artificial Sequence
  Description of Artificial Sequence: Synthetic oligonucleotide
atttcacaaccttgtagatgcc

SEQ ID NO: 6971 - DNA, 22 bp, Artificial Sequence
  Description of Artificial Sequence: Synthetic oligonucleotide
taactattaaaggaagcaaggg

SEQ ID NO: 6972 - DNA, 22 bp, Artificial Sequence
  Description of Artificial Sequence: Synthetic oligonucleotide
atattggatcagaatttaccct

SEQ ID NO: 6973 - DNA, 22 bp, Artificial Sequence
  Description of Artificial Sequence: Synthetic oligonucleotide
gtaggaatcagtgatgagccgc

SEQ ID NO: 6974 - DNA, 22 bp, Artificial Sequence
  Description of Artificial Sequence: Synthetic oligonucleotide
ttcatcacagagatattcacgg

SEQ ID NO: 6975 - DNA, 22 bp, Artificial Sequence
  Description of Artificial Sequence: Synthetic oligonucleotide
ttatttatacctttaagggcca

SEQ ID NO: 6976 - DNA, 22 bp, Artificial Sequence
  Description of Artificial Sequence: Synthetic oligonucleotide
atttcttgaatctacaatgcga

SEQ ID NO: 6977 - DNA, 22 bp, Artificial Sequence
  Description of Artificial Sequence: Synthetic oligonucleotide
ttatgctgcagaatatagtcgg

SEQ ID NO: 6978 - DNA, 22 bp, Artificial Sequence
  Description of Artificial Sequence: Synthetic oligonucleotide
ttccacaaagtcaggattacct

SEQ ID NO: 6979 - DNA, 22 bp, Artificial Sequence
  Description of Artificial Sequence: Synthetic oligonucleotide
taaagaaaccttatttctaggt

SEQ ID NO: 6980 - DNA, 22 bp, Artificial Sequence
  Description of Artificial Sequence: Synthetic oligonucleotide
ttattctttgggttcctctggt

SEQ ID NO: 6981 - DNA, 22 bp, Artificial Sequence
  Description of Artificial Sequence: Synthetic oligonucleotide
attattgctggcggtggcacca

SEQ ID NO: 6982 - DNA, 22 bp, Artificial Sequence
  Description of Artificial Sequence: Synthetic oligonucleotide
ttatctcatcctgatatagcgt

SEQ ID NO: 6983 - DNA, 22 bp, Artificial Sequence
  Description of Artificial Sequence: Synthetic oligonucleotide
aatatttccgtgtttctcagca

SEQ ID NO: 6984 - DNA, 22 bp, Artificial Sequence
  Description of Artificial Sequence: Synthetic oligonucleotide
tgagtttccaacataaggacac

SEQ ID NO: 6985 - DNA, 22 bp, Artificial Sequence
  Description of Artificial Sequence: Synthetic oligonucleotide
gtttccttaaatacacagctgc

SEQ ID NO: 6986 - DNA, 22 bp, Artificial Sequence
  Description of Artificial Sequence: Synthetic oligonucleotide
taaatattggtatctgataccg

SEQ ID NO: 6987 - DNA, 22 bp, Artificial Sequence
  Description of Artificial Sequence: Synthetic oligonucleotide
ttcgtttccaaagttggtacca

SEQ ID NO: 6988 - DNA, 22 bp, Artificial Sequence
  Description of Artificial Sequence: Synthetic oligonucleotide
atactgacacagtatggatggt

SEQ ID NO: 6989 - DNA, 22 bp, Artificial Sequence
  Description of Artificial Sequence: Synthetic oligonucleotide
attatgttgccatttgagaccc

SEQ ID NO: 6990 - DNA, 22 bp, Artificial Sequence
  Description of Artificial Sequence: Synthetic oligonucleotide
tttcccatgctttgtagctcgg

SEQ ID NO: 6991 - DNA, 22 bp, Artificial Sequence
  Description of Artificial Sequence: Synthetic oligonucleotide
tttcacaaccttgtagatgcca

SEQ ID NO: 6992 - DNA, 22 bp, Artificial Sequence
  Description of Artificial Sequence: Synthetic oligonucleotide
atttacctgcctataaagtcgc

SEQ ID NO: 6993 - DNA, 22 bp, Artificial Sequence
  Description of Artificial Sequence: Synthetic oligonucleotide
tatttacaacatccaaactcgt

SEQ ID NO: 6994 - DNA, 22 bp, Artificial Sequence
  Description of Artificial Sequence: Synthetic oligonucleotide
ttataatcgaaaggcttgtggg

SEQ ID NO: 6995 - DNA, 22 bp, Artificial Sequence
  Description of Artificial Sequence: Synthetic oligonucleotide
atatagtggatgctcctcaggt

SEQ ID NO: 6996 - DNA, 22 bp, Artificial Sequence
  Description of Artificial Sequence: Synthetic oligonucleotide
ttatagttcacactttcgtccg

SEQ ID NO: 6997 - DNA, 22 bp, Artificial Sequence
  Description of Artificial Sequence: Synthetic oligonucleotide
aatcactggttcttggcatggg

SEQ ID NO: 6998 - DNA, 22 bp, Artificial Sequence
  Description of Artificial Sequence: Synthetic oligonucleotide
taagtttctgagattgtatgct

SEQ ID NO: 6999 - DNA, 22 bp, Artificial Sequence
  Description of Artificial Sequence: Synthetic oligonucleotide
attatgtacaccatttacagga

SEQ ID NO: 7000 - DNA, 22 bp, Artificial Sequence
  Description of Artificial Sequence: Synthetic oligonucleotide
tttagcatttgtagcttgtggg

SEQ ID NO: 7001 - DNA, 22 bp, Artificial Sequence
  Description of Artificial Sequence: Synthetic oligonucleotide
tttcttgtgcacttggtagctt

SEQ ID NO: 7002 - DNA, 22 bp, Artificial Sequence
  Description of Artificial Sequence: Synthetic oligonucleotide
atctcctttgaaataaatagca

SEQ ID NO: 7003 - DNA, 22 bp, Artificial Sequence
  Description of Artificial Sequence: Synthetic oligonucleotide
atatgaaggtaaagggagggcc

SEQ ID NO: 7004 - DNA, 22 bp, Artificial Sequence
  Description of Artificial Sequence: Synthetic oligonucleotide
atagttctccaggtatctggct

SEQ ID NO: 7005 - DNA, 22 bp, Artificial Sequence
  Description of Artificial Sequence: Synthetic oligonucleotide
tttaggagtctcactttcggct

SEQ ID NO: 7006 - DNA, 22 bp, Artificial Sequence
  Description of Artificial Sequence: Synthetic oligonucleotide
tagaactggtagatactcacgg

SEQ ID NO: 7007 - DNA, 22 bp, Artificial Sequence
  Description of Artificial Sequence: Synthetic oligonucleotide
tatgctgagggtagcctcaggc

SEQ ID NO: 7008 - DNA, 22 bp, Artificial Sequence
  Description of Artificial Sequence: Synthetic oligonucleotide
atttgtctcctcttcactaggt

SEQ ID NO: 7009 - DNA, 22 bp, Artificial Sequence
  Description of Artificial Sequence: Synthetic oligonucleotide
atttatggtgaatgaatatggc

SEQ ID NO: 7010 - DNA, 22 bp, Artificial Sequence
  Description of Artificial Sequence: Synthetic oligonucleotide
atgacacaagtacttatgagca

SEQ ID NO: 7011 - DNA, 22 bp, Artificial Sequence
  Description of Artificial Sequence: Synthetic oligonucleotide
ttgggttgtcctttcgtttgcc

SEQ ID NO: 7012 - DNA, 22 bp, Artificial Sequence
  Description of Artificial Sequence: Synthetic oligonucleotide
taaacttgtaggtgacgacgcc

SEQ ID NO: 7013 - DNA, 22 bp, Artificial Sequence
  Description of Artificial Sequence: Synthetic oligonucleotide
atttaagatcttctgttgccgc

SEQ ID NO: 7014 - DNA, 22 bp, Artificial Sequence
  Description of Artificial Sequence: Synthetic oligonucleotide
atacttacgactcaataatcga

SEQ ID NO: 7015 - DNA, 22 bp, Artificial Sequence
  Description of Artificial Sequence: Synthetic oligonucleotide
ttctttaattggactcttggct

SEQ ID NO: 7016 - DNA, 22 bp, Artificial Sequence
  Description of Artificial Sequence: Synthetic oligonucleotide
ttataaattggaagcatcagcc

SEQ ID NO: 7017 - DNA, 22 bp, Artificial Sequence
  Description of Artificial Sequence: Synthetic oligonucleotide
tttccagatttgaaagtgacca

SEQ ID NO: 7018 - DNA, 22 bp, Artificial Sequence
  Description of Artificial Sequence: Synthetic oligonucleotide
aattgtttacacattcttgcca

SEQ ID NO: 7019 - DNA, 22 bp, Artificial Sequence
  Description of Artificial Sequence: Synthetic oligonucleotide
ttcatttaccaggatcagacct

SEQ ID NO: 7020 - DNA, 22 bp, Artificial Sequence
  Description of Artificial Sequence: Synthetic oligonucleotide
tattcctcagtatttgggcggt

SEQ ID NO: 7021 - DNA, 22 bp, Artificial Sequence
  Description of Artificial Sequence: Synthetic oligonucleotide
tttactcaaagaaattgccggg

SEQ ID NO: 7022 - DNA, 22 bp, Artificial Sequence
  Description of Artificial Sequence: Synthetic oligonucleotide
attattatacagatctccaggc

SEQ ID NO: 7023 - DNA, 22 bp, Artificial Sequence
  Description of Artificial Sequence: Synthetic oligonucleotide
tattatttacaccaaatgtcca

SEQ ID NO: 7024 - DNA, 22 bp, Artificial Sequence
  Description of Artificial Sequence: Synthetic oligonucleotide
tttatttaccctgttcactggc

SEQ ID NO: 7025 - DNA, 22 bp, Artificial Sequence
  Description of Artificial Sequence: Synthetic oligonucleotide
ttcttatagatgtgcacttcgt

SEQ ID NO: 7026 - DNA, 22 bp, Artificial Sequence
  Description of Artificial Sequence: Synthetic oligonucleotide
ttataattctctggcagttcct

SEQ ID NO: 7027 - DNA, 22 bp, Artificial Sequence
  Description of Artificial Sequence: Synthetic oligonucleotide
aattatgtgaattatgttgcgt

SEQ ID NO: 7028 - DNA, 22 bp, Artificial Sequence
  Description of Artificial Sequence: Synthetic oligonucleotide
aatttgagacatataaagaggc

SEQ ID NO: 7029 - DNA, 22 bp, Artificial Sequence
  Description of Artificial Sequence: Synthetic oligonucleotide
tataggcaggatgctttcaggc

SEQ ID NO: 7030 - DNA, 22 bp, Artificial Sequence
  Description of Artificial Sequence: Synthetic oligonucleotide
taacatatacacagaagtccgt

SEQ ID NO: 7031 - DNA, 22 bp, Artificial Sequence
  Description of Artificial Sequence: Synthetic oligonucleotide
tattcacaacaagctctagcca

SEQ ID NO: 7032 - DNA, 22 bp, Artificial Sequence
  Description of Artificial Sequence: Synthetic oligonucleotide
tattatttagctctgaactggt

SEQ ID NO: 7033 - DNA, 22 bp, Artificial Sequence
  Description of Artificial Sequence: Synthetic oligonucleotide
tttctgcatctcctcgtaacgc

SEQ ID NO: 7034 - DNA, 22 bp, Artificial Sequence
  Description of Artificial Sequence: Synthetic oligonucleotide
ttcatatagtgcttgcttgcgc

SEQ ID NO: 7035 - DNA, 22 bp, Artificial Sequence
  Description of Artificial Sequence: Synthetic oligonucleotide
ttgcgtattcatatagtgcttg

SEQ ID NO: 7036 - DNA, 22 bp, Artificial Sequence
  Description of Artificial Sequence: Synthetic oligonucleotide
ataatctaacatagtcatactc

SEQ ID NO: 7037 - DNA, 22 bp, Artificial Sequence
  Description of Artificial Sequence: Synthetic oligonucleotide
tttaatgagcagtgactctggg

SEQ ID NO: 7038 - DNA, 22 bp, Artificial Sequence
  Description of Artificial Sequence: Synthetic oligonucleotide
ttaatagtaaattctctgacgt

SEQ ID NO: 7039 - DNA, 22 bp, Artificial Sequence
  Description of Artificial Sequence: Synthetic oligonucleotide
ataacatatgtggtgtagccca

SEQ ID NO: 7040 - DNA, 22 bp, Artificial Sequence
  Description of Artificial Sequence: Synthetic oligonucleotide
ttctcatcagagtcgcggagca

SEQ ID NO: 7041 - DNA, 22 bp, Artificial Sequence
  Description of Artificial Sequence: Synthetic oligonucleotide
tatcaaccacaatatcccaggc

SEQ ID NO: 7042 - DNA, 22 bp, Artificial Sequence
  Description of Artificial Sequence: Synthetic oligonucleotide
taggtttctgagagtaaaccct

SEQ ID NO: 7043 - DNA, 22 bp, Artificial Sequence
  Description of Artificial Sequence: Synthetic oligonucleotide
ttaataaggcactttctgtgga

SEQ ID NO: 7044 - DNA, 22 bp, Artificial Sequence
  Description of Artificial Sequence: Synthetic oligonucleotide
ttctattattagtaaacctggc

SEQ ID NO: 7045 - DNA, 22 bp, Artificial Sequence
  Description of Artificial Sequence: Synthetic oligonucleotide
ttatctcggaggatgccggcgc

SEQ ID NO: 7046 - DNA, 22 bp, Artificial Sequence
  Description of Artificial Sequence: Synthetic oligonucleotide
ttaactcaaggtagttatagca

SEQ ID NO: 7047 - DNA, 22 bp, Artificial Sequence
  Description of Artificial Sequence: Synthetic oligonucleotide
tatgactaaattgttggtggcc

SEQ ID NO: 7048 - DNA, 22 bp, Artificial Sequence
  Description of Artificial Sequence: Synthetic oligonucleotide
aactgcactaatatttacacca

SEQ ID NO: 7049 - DNA, 22 bp, Artificial Sequence
  Description of Artificial Sequence: Synthetic oligonucleotide
atgcaaagatccataatgtggt

SEQ ID NO: 7050 - DNA, 22 bp, Artificial Sequence
  Description of Artificial Sequence: Synthetic oligonucleotide
ttcatttctctttcataacggg

SEQ ID NO: 7051 - DNA, 22 bp, Artificial Sequence
  Description of Artificial Sequence: Synthetic oligonucleotide
tatttctattcagaagcatcca

SEQ ID NO: 7052 - DNA, 22 bp, Artificial Sequence
  Description of Artificial Sequence: Synthetic oligonucleotide
aatatttacaccatgtaaccct

SEQ ID NO: 7053 - DNA, 22 bp, Artificial Sequence
  Description of Artificial Sequence: Synthetic oligonucleotide
tataatttgccattgctgggca

SEQ ID NO: 7054 - DNA, 22 bp, Artificial Sequence
  Description of Artificial Sequence: Synthetic oligonucleotide
aattctgtgaggatcctttgct

SEQ ID NO: 7055 - DNA, 22 bp, Artificial Sequence
  Description of Artificial Sequence: Synthetic oligonucleotide
ttaactgaataattcattccct

SEQ ID NO: 7056 - DNA, 22 bp, Artificial Sequence
  Description of Artificial Sequence: Synthetic oligonucleotide
tttctaagtaaccaacatagcc

SEQ ID NO: 7057 - DNA, 22 bp, Artificial Sequence
  Description of Artificial Sequence: Synthetic oligonucleotide
atatttcttgtttggtacaggg

SEQ ID NO: 7058 - DNA, 22 bp, Artificial Sequence
  Description of Artificial Sequence: Synthetic oligonucleotide
ttacaacactgaggaaaggcca

SEQ ID NO: 7059 - DNA, 22 bp, Artificial Sequence
  Description of Artificial Sequence: Synthetic oligonucleotide
atatagaagcaggtaccaagcc

SEQ ID NO: 7060 - DNA, 22 bp, Artificial Sequence
  Description of Artificial Sequence: Synthetic oligonucleotide
ttaaatgaatacctactttggc

SEQ ID NO: 7061 - DNA, 22 bp, Artificial Sequence
  Description of Artificial Sequence: Synthetic oligonucleotide
taatactcttctgcattgggcc

SEQ ID NO: 7062 - DNA, 22 bp, Artificial Sequence
  Description of Artificial Sequence: Synthetic oligonucleotide
tttgtgcacgatcttaattcct

SEQ ID NO: 7063 - DNA, 22 bp, Artificial Sequence
  Description of Artificial Sequence: Synthetic oligonucleotide
ttatcaaaccggatgcatcgga

SEQ ID NO: 7064 - DNA, 22 bp, Artificial Sequence
  Description of Artificial Sequence: Synthetic oligonucleotide
ttaaacaatgaaggtttgtggg

SEQ ID NO: 7065 - DNA, 22 bp, Artificial Sequence
  Description of Artificial Sequence: Synthetic oligonucleotide
tatttagtgcatagtgatgcca

SEQ ID NO: 7066 - DNA, 22 bp, Artificial Sequence
  Description of Artificial Sequence: Synthetic oligonucleotide
atacaactttgattcgcaacca

SEQ ID NO: 7067 - DNA, 22 bp, Artificial Sequence
  Description of Artificial Sequence: Synthetic oligonucleotide
atgagctttaaattcttgtcct

SEQ ID NO: 7068 - DNA, 22 bp, Artificial Sequence
  Description of Artificial Sequence: Synthetic oligonucleotide
attgtaaggcgtattgtaccct

SEQ ID NO: 7069 - DNA, 22 bp, Artificial Sequence
  Description of Artificial Sequence: Synthetic oligonucleotide
atatctattcatcatttctgga

SEQ ID NO: 7070 - DNA, 22 bp, Artificial Sequence
  Description of Artificial Sequence: Synthetic oligonucleotide
ttattattatctgtaaggtggc

SEQ ID NO: 7071 - DNA, 22 bp, Artificial Sequence
  Description of Artificial Sequence: Synthetic oligonucleotide
tttccttatccctttgacagca

SEQ ID NO: 7072 - DNA, 22 bp, Artificial Sequence
  Description of Artificial Sequence: Synthetic oligonucleotide
atttgtgaaatccttccagcgt

SEQ ID NO: 7073 - DNA, 22 bp, Artificial Sequence
  Description of Artificial Sequence: Synthetic oligonucleotide
aacagtaagccagtaaagagcc

SEQ ID NO: 7074 - DNA, 22 bp, Artificial Sequence
  Description of Artificial Sequence: Synthetic oligonucleotide
tttggtctttgcagcagggctc

SEQ ID NO: 7075 - DNA, 22 bp, Artificial Sequence
  Description of Artificial Sequence: Synthetic oligonucleotide
tttagtcataatatactggcca

SEQ ID NO: 7076 - DNA, 22 bp, Artificial Sequence
  Description of Artificial Sequence: Synthetic oligonucleotide
ttgtggctacatataaagacca

SEQ ID NO: 7077 - DNA, 22 bp, Artificial Sequence
  Description of Artificial Sequence: Synthetic oligonucleotide
ttcacagagaagcttggcacgc

SEQ ID NO: 7078 - DNA, 22 bp, Artificial Sequence
  Description of Artificial Sequence: Synthetic oligonucleotide
ttgaccagttaaacttagacct

SEQ ID NO: 7079 - DNA, 22 bp, Artificial Sequence
  Description of Artificial Sequence: Synthetic oligonucleotide
attattaattacctgcttagca

SEQ ID NO: 7080 - DNA, 22 bp, Artificial Sequence
  Description of Artificial Sequence: Synthetic oligonucleotide
ttctctgaagattattgtgctc

SEQ ID NO: 7081 - DNA, 22 bp, Artificial Sequence
  Description of Artificial Sequence: Synthetic oligonucleotide
attctggaagcatttcatgcct

SEQ ID NO: 7082 - DNA, 22 bp, Artificial Sequence
  Description of Artificial Sequence: Synthetic oligonucleotide
tttggttcatttagaagttcct

SEQ ID NO: 7083 - DNA, 22 bp, Artificial Sequence
  Description of Artificial Sequence: Synthetic oligonucleotide
attgagatgaacgattattggg

SEQ ID NO: 7084 - DNA, 22 bp, Artificial Sequence
  Description of Artificial Sequence: Synthetic oligonucleotide
ttctgacagcagttgtttacca

SEQ ID NO: 7085 - DNA, 22 bp, Artificial Sequence
  Description of Artificial Sequence: Synthetic oligonucleotide
ataatgagtaacttcagaaggc

SEQ ID NO: 7086 - DNA, 22 bp, Artificial Sequence
  Description of Artificial Sequence: Synthetic oligonucleotide
attataccagaagtggagggct

SEQ ID NO: 7087 - DNA, 22 bp, Artificial Sequence
  Description of Artificial Sequence: Synthetic oligonucleotide
atattatttaagcaactggcgt

SEQ ID NO: 7088 - DNA, 22 bp, Artificial Sequence
  Description of Artificial Sequence: Synthetic oligonucleotide
attcaagatatacatatgggct

SEQ ID NO: 7089 - DNA, 22 bp, Artificial Sequence
  Description of Artificial Sequence: Synthetic oligonucleotide
ttatttcaactctgcgaggccc

SEQ ID NO: 7090 - DNA, 22 bp, Artificial Sequence
  Description of Artificial Sequence: Synthetic oligonucleotide
atactgcaaatcagaaactgct

SEQ ID NO: 7091 - DNA, 22 bp, Artificial Sequence
  Description of Artificial Sequence: Synthetic oligonucleotide
attctttatactaggcactggc

SEQ ID NO: 7092 - DNA, 22 bp, Artificial Sequence
  Description of Artificial Sequence: Synthetic oligonucleotide
tttagagcagtgtatatatcca

SEQ ID NO: 7093 - DNA, 22 bp, Artificial Sequence
  Description of Artificial Sequence: Synthetic oligonucleotide
atacttcatagacaactgggct

SEQ ID NO: 7094 - DNA, 22 bp, Artificial Sequence
  Description of Artificial Sequence: Synthetic oligonucleotide
atagcctatgatcataacacca

SEQ ID NO: 7095 - DNA, 22 bp, Artificial Sequence
  Description of Artificial Sequence: Synthetic oligonucleotide
attcagtacaattaggtgggct

SEQ ID NO: 7096 - DNA, 22 bp, Artificial Sequence
  Description of Artificial Sequence: Synthetic oligonucleotide
ttaaacatcaagacggcatgct

SEQ ID NO: 7097 - DNA, 22 bp, Artificial Sequence
  Description of Artificial Sequence: Synthetic oligonucleotide
ttattacaagccattaattgct

SEQ ID NO: 7098 - DNA, 22 bp, Artificial Sequence
  Description of Artificial Sequence: Synthetic oligonucleotide
atatgactttcaatatacagcc

SEQ ID NO: 7099 - DNA, 22 bp, Artificial Sequence
  Description of Artificial Sequence: Synthetic oligonucleotide
tatattcatccctctccttcca

SEQ ID NO: 7100 - DNA, 22 bp, Artificial Sequence
  Description of Artificial Sequence: Synthetic oligonucleotide
atataaatgtgaaatcacaccc

SEQ ID NO: 7101 - DNA, 22 bp, Artificial Sequence
  Description of Artificial Sequence: Synthetic oligonucleotide
tttgaatttccaaatgaagggc

SEQ ID NO: 7102 - DNA, 22 bp, Artificial Sequence
  Description of Artificial Sequence: Synthetic oligonucleotide
attagaacaggactcgttcgct

SEQ ID NO: 7103 - DNA, 22 bp, Artificial Sequence
  Description of Artificial Sequence: Synthetic oligonucleotide
atttcagagctactgtagccct

SEQ ID NO: 7104 - DNA, 22 bp, Artificial Sequence
  Description of Artificial Sequence: Synthetic oligonucleotide
ttcaacaaattctgtaattggg

SEQ ID NO: 7105 - DNA, 22 bp, Artificial Sequence
  Description of Artificial Sequence: Synthetic oligonucleotide
tttctcttgcataagattccct

SEQ ID NO: 7106 - DNA, 22 bp, Artificial Sequence
  Description of Artificial Sequence: Synthetic oligonucleotide
ttagatcaactacttcaaggct

SEQ ID NO: 7107 - DNA, 22 bp, Artificial Sequence
  Description of Artificial Sequence: Synthetic oligonucleotide
tatctttctgcaatgtccgggc

SEQ ID NO: 7108 - DNA, 22 bp, Artificial Sequence
  Description of Artificial Sequence: Synthetic oligonucleotide
ttaaacctagctcttgactggc

SEQ ID NO: 7109 - DNA, 22 bp, Artificial Sequence
  Description of Artificial Sequence: Synthetic oligonucleotide
atatgtggtcacactttgtgga

SEQ ID NO: 7110 - DNA, 22 bp, Artificial Sequence
  Description of Artificial Sequence: Synthetic oligonucleotide
tttaatttactatacaggtccc

SEQ ID NO: 7111 - DNA, 22 bp, Artificial Sequence
  Description of Artificial Sequence: Synthetic oligonucleotide
ttcttgaagtacttcatgagct

SEQ ID NO: 7112 - DNA, 22 bp, Artificial Sequence
  Description of Artificial Sequence: Synthetic oligonucleotide
ttctagcaagagaagccatctt

SEQ ID NO: 7113 - DNA, 22 bp, Artificial Sequence
  Description of Artificial Sequence: Synthetic oligonucleotide
atacaatggaatacagattgct

SEQ ID NO: 7114 - DNA, 22 bp, Artificial Sequence
  Description of Artificial Sequence: Synthetic oligonucleotide
tattctaatccaatatacagca

SEQ ID NO: 7115 - DNA, 22 bp, Artificial Sequence
  Description of Artificial Sequence: Synthetic oligonucleotide
attgacctgtctataatgggct

SEQ ID NO: 7116 - DNA, 22 bp, Artificial Sequence
  Description of Artificial Sequence: Synthetic oligonucleotide
tacatctattcacagtacggct

SEQ ID NO: 7117 - DNA, 22 bp, Artificial Sequence
  Description of Artificial Sequence: Synthetic oligonucleotide
taagataaagtgtagtacccgt

SEQ ID NO: 7118 - DNA, 22 bp, Artificial Sequence
  Description of Artificial Sequence: Synthetic oligonucleotide
tttcatggtgaatttcttggct

SEQ ID NO: 7119 - DNA, 22 bp, Artificial Sequence
  Description of Artificial Sequence: Synthetic oligonucleotide
atggattctctactagtgcggg

SEQ ID NO: 7120 - DNA, 22 bp, Artificial Sequence
  Description of Artificial Sequence: Synthetic oligonucleotide
ataactagaggtatctttggca

SEQ ID NO: 7121 - DNA, 22 bp, Artificial Sequence
  Description of Artificial Sequence: Synthetic oligonucleotide
tttagcaaatgcatctgtcgga

SEQ ID NO: 7122 - DNA, 22 bp, Artificial Sequence
  Description of Artificial Sequence: Synthetic oligonucleotide
atttgcaatgaggatttaaggc

SEQ ID NO: 7123 - DNA, 22 bp, Artificial Sequence
  Description of Artificial Sequence: Synthetic oligonucleotide
atcttagaaccaatagttccag

SEQ ID NO: 7124 - DNA, 22 bp, Artificial Sequence
  Description of Artificial Sequence: Synthetic oligonucleotide
taacataactagtatgttgtat

SEQ ID NO: 7125 - DNA, 22 bp, Artificial Sequence
  Description of Artificial Sequence: Synthetic oligonucleotide
tactttaaataactgaagccca

SEQ ID NO: 7126 - DNA, 22 bp, Artificial Sequence
  Description of Artificial Sequence: Synthetic oligonucleotide
attaagttacaagttggcaggc

SEQ ID NO: 7127 - DNA, 22 bp, Artificial Sequence
  Description of Artificial Sequence: Synthetic oligonucleotide
tttattcccgatttcataagca

SEQ ID NO: 7128 - DNA, 22 bp, Artificial Sequence
  Description of Artificial Sequence: Synthetic oligonucleotide
ttaatttcacagaaatacagca

SEQ ID NO: 7129 - DNA, 22 bp, Artificial Sequence
  Description of Artificial Sequence: Synthetic oligonucleotide
taatgaaggaatagtagtggcc

SEQ ID NO: 7130 - DNA, 22 bp, Artificial Sequence
  Description of Artificial Sequence: Synthetic oligonucleotide
ataggttattcgtggctttgtt

SEQ ID NO: 7131 - DNA, 22 bp, Artificial Sequence
  Description of Artificial Sequence: Synthetic oligonucleotide
aacacttcagaaacaattggct

SEQ ID NO: 7132 - DNA, 22 bp, Artificial Sequence
  Description of Artificial Sequence: Synthetic oligonucleotide
ttatgtaatacatttccagcca

SEQ ID NO: 7133 - DNA, 22 bp, Artificial Sequence
  Description of Artificial Sequence: Synthetic oligonucleotide
ttcaggtctatattcaatggct

SEQ ID NO: 7134 - DNA, 22 bp, Artificial Sequence
  Description of Artificial Sequence: Synthetic oligonucleotide
attctttaactcatgaggtgga

SEQ ID NO: 7135 - DNA, 22 bp, Artificial Sequence
  Description of Artificial Sequence: Synthetic oligonucleotide
ataatggataattgagataggc

SEQ ID NO: 7136 - DNA, 22 bp, Artificial Sequence
  Description of Artificial Sequence: Synthetic oligonucleotide
taaacctcactgtgttattgcc

SEQ ID NO: 7137 - DNA, 22 bp, Artificial Sequence
  Description of Artificial Sequence: Synthetic oligonucleotide
ttaataatctgtttgatcagct

SEQ ID NO: 7138 - DNA, 22 bp, Artificial Sequence
  Description of Artificial Sequence: Synthetic oligonucleotide
tttgacctgctactggaaaggc

SEQ ID NO: 7139 - DNA, 22 bp, Artificial Sequence
  Description of Artificial Sequence: Synthetic oligonucleotide
ttaatcttcaacctggtttctg

SEQ ID NO: 7140 - DNA, 22 bp, Artificial Sequence
  Description of Artificial Sequence: Synthetic oligonucleotide
taattgcatctcaagataggca

SEQ ID NO: 7141 - DNA, 22 bp, Artificial Sequence
  Description of Artificial Sequence: Synthetic oligonucleotide
ttgtcctataggtactctaggt

SEQ ID NO: 7142 - DNA, 22 bp, Artificial Sequence
  Description of Artificial Sequence: Synthetic oligonucleotide
tttgattgttgaattggcagga

SEQ ID NO: 7143 - DNA, 22 bp, Artificial Sequence
  Description of Artificial Sequence: Synthetic oligonucleotide
atcttaaggaacagagcgcgct

SEQ ID NO: 7144 - DNA, 22 bp, Artificial Sequence
  Description of Artificial Sequence: Synthetic oligonucleotide
atataggatctcatacacacgt

SEQ ID NO: 7145 - DNA, 22 bp, Artificial Sequence
  Description of Artificial Sequence: Synthetic oligonucleotide
ttgataatggaacggaatccgc

SEQ ID NO: 7146 - DNA, 22 bp, Artificial Sequence
  Description of Artificial Sequence: Synthetic oligonucleotide
tttattaggaactgaaatggct

SEQ ID NO: 7147 - DNA, 22 bp, Artificial Sequence
  Description of Artificial Sequence: Synthetic oligonucleotide
ttagtcagcacaatcattcggt

SEQ ID NO: 7148 - DNA, 22 bp, Artificial Sequence
  Description of Artificial Sequence: Synthetic oligonucleotide
aatattacccgcatttagggct

SEQ ID NO: 7149 - DNA, 22 bp, Artificial Sequence
  Description of Artificial Sequence: Synthetic oligonucleotide
ttatttcataaatgaggatggt

SEQ ID NO: 7150 - DNA, 22 bp, Artificial Sequence
  Description of Artificial Sequence: Synthetic oligonucleotide
ttcatgaatcggagcctagcct

SEQ ID NO: 7151 - DNA, 22 bp, Artificial Sequence
  Description of Artificial Sequence: Synthetic oligonucleotide
ttacacttaataggatagtcct

SEQ ID NO: 7152 - DNA, 22 bp, Artificial Sequence
  Description of Artificial Sequence: Synthetic oligonucleotide
ttaaatgccaggacattaagct

SEQ ID NO: 7153 - DNA, 22 bp, Artificial Sequence
  Description of Artificial Sequence: Synthetic oligonucleotide
ataacataatccacttgaggcg

SEQ ID NO: 7154 - DNA, 22 bp, Artificial Sequence
  Description of Artificial Sequence: Synthetic oligonucleotide
tttctgtgtgaaggtacaacct

SEQ ID NO: 7155 - DNA, 22 bp, Artificial Sequence
  Description of Artificial Sequence: Synthetic oligonucleotide
tttatatgttgtccaaactggt

SEQ ID NO: 7156 - DNA, 22 bp, Artificial Sequence
  Description of Artificial Sequence: Synthetic oligonucleotide
tttacacattggacatgttcgg

SEQ ID NO: 7157 - DNA, 22 bp, Artificial Sequence
  Description of Artificial Sequence: Synthetic oligonucleotide
ttaagatctatagccctctcct

SEQ ID NO: 7158 - DNA, 22 bp, Artificial Sequence
  Description of Artificial Sequence: Synthetic oligonucleotide
ttagactttaacaaattcagct

SEQ ID NO: 7159 - DNA, 22 bp, Artificial Sequence
  Description of Artificial Sequence: Synthetic oligonucleotide
tatttctgaaataaggctccca

SEQ ID NO: 7160 - DNA, 22 bp, Artificial Sequence
  Description of Artificial Sequence: Synthetic oligonucleotide
ttggtttatacaattcaatgca

SEQ ID NO: 7161 - DNA, 22 bp, Artificial Sequence
  Description of Artificial Sequence: Synthetic oligonucleotide
attaagataaagtgtagtaccc

SEQ ID NO: 7162 - DNA, 22 bp, Artificial Sequence
  Description of Artificial Sequence: Synthetic oligonucleotide
atactttgacagcaagattctt

SEQ ID NO: 7163 - DNA, 22 bp, Artificial Sequence
  Description of Artificial Sequence: Synthetic oligonucleotide
attgtggccttaattaaatcct

SEQ ID NO: 7164 - DNA, 22 bp, Artificial Sequence
  Description of Artificial Sequence: Synthetic oligonucleotide
ataaggtattcaggttcctccg

SEQ ID NO: 7165 - DNA, 22 bp, Artificial Sequence
  Description of Artificial Sequence: Synthetic oligonucleotide
attacaatccactttacaggcc

SEQ ID NO: 7166 - DNA, 22 bp, Artificial Sequence
  Description of Artificial Sequence: Synthetic oligonucleotide
ataggagtaaatctgaagagca

SEQ ID NO: 7167 - DNA, 22 bp, Artificial Sequence
  Description of Artificial Sequence: Synthetic oligonucleotide
atattcccacaacatatttccc

SEQ ID NO: 7168 - DNA, 22 bp, Artificial Sequence
  Description of Artificial Sequence: Synthetic oligonucleotide
ataaagcaatctctatagaccc

SEQ ID NO: 7169 - DNA, 22 bp, Artificial Sequence
  Description of Artificial Sequence: Synthetic oligonucleotide
tacaattaggaaatactcagct

SEQ ID NO: 7170 - DNA, 22 bp, Artificial Sequence
  Description of Artificial Sequence: Synthetic oligonucleotide
ttaagaagcagataaacaaggt

SEQ ID NO: 7171 - DNA, 22 bp, Artificial Sequence
  Description of Artificial Sequence: Synthetic oligonucleotide
tttccaaagcatcaagaaacca

SEQ ID NO: 7172 - DNA, 22 bp, Artificial Sequence
  Description of Artificial Sequence: Synthetic oligonucleotide
aacactcagctgaattaaggcg

SEQ ID NO: 7173 - DNA, 22 bp, Artificial Sequence
  Description of Artificial Sequence: Synthetic oligonucleotide
ttgaagatcaaggtgatgggca

SEQ ID NO: 7174 - DNA, 22 bp, Artificial Sequence
  Description of Artificial Sequence: Synthetic oligonucleotide
tatatccttcttggcaaggcct

SEQ ID NO: 7175 - DNA, 22 bp, Artificial Sequence
  Description of Artificial Sequence: Synthetic oligonucleotide
taggagaatccggtgaggtccc

SEQ ID NO: 7176 - DNA, 22 bp, Artificial Sequence
  Description of Artificial Sequence: Synthetic oligonucleotide
taaacctatggcattaatccct

SEQ ID NO: 7177 - DNA, 22 bp, Artificial Sequence
  Description of Artificial Sequence: Synthetic oligonucleotide
tatttgtcagagggcttgaggc

SEQ ID NO: 7178 - DNA, 22 bp, Artificial Sequence
  Description of Artificial Sequence: Synthetic oligonucleotide
atttacaactgacgtaagggcc

SEQ ID NO: 7179 - DNA, 22 bp, Artificial Sequence
  Description of Artificial Sequence: Synthetic oligonucleotide
ataaataagaggaaggcagccc

SEQ ID NO: 7180 - DNA, 22 bp, Artificial Sequence
  Description of Artificial Sequence: Synthetic oligonucleotide
atatctacacattctaggccca

SEQ ID NO: 7181 - DNA, 22 bp, Artificial Sequence
  Description of Artificial Sequence: Synthetic oligonucleotide
tttaacatcctcgatccagcgg

SEQ ID NO: 7182 - DNA, 22 bp, Artificial Sequence
  Description of Artificial Sequence: Synthetic oligonucleotide
atatacaaggagcttattgccc

SEQ ID NO: 7183 - DNA, 22 bp, Artificial Sequence
  Description of Artificial Sequence: Synthetic oligonucleotide
tattcttggcagataaatacca

SEQ ID NO: 7184 - DNA, 22 bp, Artificial Sequence
  Description of Artificial Sequence: Synthetic oligonucleotide
tttagctttccaagcatttcct

SEQ ID NO: 7185 - DNA, 22 bp, Artificial Sequence
  Description of Artificial Sequence: Synthetic oligonucleotide
aatatgtctccatttcattggc

SEQ ID NO: 7186 - DNA, 22 bp, Artificial Sequence
  Description of Artificial Sequence: Synthetic oligonucleotide
ttcatatggaattaatgttggt

SEQ ID NO: 7187 - DNA, 22 bp, Artificial Sequence
  Description of Artificial Sequence: Synthetic oligonucleotide
aagaatatgcccaatctcaggg

SEQ ID NO: 7188 - DNA, 22 bp, Artificial Sequence
  Description of Artificial Sequence: Synthetic oligonucleotide
tatgtcaggctctttgtcagct

SEQ ID NO: 7189 - DNA, 22 bp, Artificial Sequence
  Description of Artificial Sequence: Synthetic oligonucleotide
tattatcttctgattcattcct

SEQ ID NO: 7190 - DNA, 22 bp, Artificial Sequence
  Description of Artificial Sequence: Synthetic oligonucleotide
ttcttctgtctcactaattgct

SEQ ID NO: 7191 - DNA, 22 bp, Artificial Sequence
  Description of Artificial Sequence: Synthetic oligonucleotide
tttatctagtgcagtatatcgt

SEQ ID NO: 7192 - DNA, 22 bp, Artificial Sequence
  Description of Artificial Sequence: Synthetic oligonucleotide
ttaatctggctcctgatctgcc

SEQ ID NO: 7193 - DNA, 22 bp, Artificial Sequence
  Description of Artificial Sequence: Synthetic oligonucleotide
atcatggtagccggtaacaggc

SEQ ID NO: 7194 - DNA, 22 bp, Artificial Sequence
  Description of Artificial Sequence: Synthetic oligonucleotide
aatagcaggaataatgttccct

SEQ ID NO: 7195 - DNA, 22 bp, Artificial Sequence
  Description of Artificial Sequence: Synthetic oligonucleotide
atctttgatgagtatggtcggg

SEQ ID NO: 7196 - DNA, 22 bp, Artificial Sequence
  Description of Artificial Sequence: Synthetic oligonucleotide
ttggtgaacaattatcacacga

SEQ ID NO: 7197 - DNA, 22 bp, Artificial Sequence
  Description of Artificial Sequence: Synthetic oligonucleotide
atttgctagtttaggaacagca

SEQ ID NO: 7198 - DNA, 22 bp, Artificial Sequence
  Description of Artificial Sequence: Synthetic oligonucleotide
aatattacacattgcatcaggt

SEQ ID NO: 7199 - DNA, 22 bp, Artificial Sequence
  Description of Artificial Sequence: Synthetic oligonucleotide
tattcttctcgaacttctggct

SEQ ID NO: 7200 - DNA, 22 bp, Artificial Sequence
  Description of Artificial Sequence: Synthetic oligonucleotide
tttgttcaagtgtaacactggc

SEQ ID NO: 7201 - DNA, 22 bp, Artificial Sequence
  Description of Artificial Sequence: Synthetic oligonucleotide
taaatatctcagggtgagaggg

SEQ ID NO: 7202 - DNA, 22 bp, Artificial Sequence
  Description of Artificial Sequence: Synthetic oligonucleotide
taaatggttaactgggctgcca

SEQ ID NO: 7203 - DNA, 22 bp, Artificial Sequence
  Description of Artificial Sequence: Synthetic oligonucleotide
taagaacacttgagaatgcgcc

SEQ ID NO: 7204 - DNA, 22 bp, Artificial Sequence
  Description of Artificial Sequence: Synthetic oligonucleotide
ttcttcagtaacgttggcagct

SEQ ID NO: 7205 - DNA, 22 bp, Artificial Sequence
  Description of Artificial Sequence: Synthetic oligonucleotide
ttcatttgttcaattacgtcgt

SEQ ID NO: 7206 - DNA, 22 bp, Artificial Sequence
  Description of Artificial Sequence: Synthetic oligonucleotide
tttaatgtgccgtagaaaccca

SEQ ID NO: 7207 - DNA, 22 bp, Artificial Sequence
  Description of Artificial Sequence: Synthetic oligonucleotide
ttaaatccactaactgttccgg

SEQ ID NO: 7208 - DNA, 22 bp, Artificial Sequence
  Description of Artificial Sequence: Synthetic oligonucleotide
atttagaagttcctgtattcct

SEQ ID NO: 7209 - DNA, 22 bp, Artificial Sequence
  Description of Artificial Sequence: Synthetic oligonucleotide
atgtcgcacatgattagatgcc

SEQ ID NO: 7210 - DNA, 22 bp, Artificial Sequence
  Description of Artificial Sequence: Synthetic oligonucleotide
ttcattctttactgaaacagct

SEQ ID NO: 7211 - DNA, 22 bp, Artificial Sequence
  Description of Artificial Sequence: Synthetic oligonucleotide
taacatagtcatactctctggc

SEQ ID NO: 7212 - DNA, 22 bp, Artificial Sequence
  Description of Artificial Sequence: Synthetic oligonucleotide
attgtacaggaatctcagtcca

SEQ ID NO: 7213 - DNA, 22 bp, Artificial Sequence
  Description of Artificial Sequence: Synthetic oligonucleotide
ataatcaattcattctctcgct

SEQ ID NO: 7214 - DNA, 22 bp, Artificial Sequence
  Description of Artificial Sequence: Synthetic oligonucleotide
aatacttggagaataatgtcct

SEQ ID NO: 7215 - DNA, 22 bp, Artificial Sequence
  Description of Artificial Sequence: Synthetic oligonucleotide
tatttatgacagaagaagtggc

SEQ ID NO: 7216 - DNA, 22 bp, Artificial Sequence
  Description of Artificial Sequence: Synthetic oligonucleotide
atatgcgccttgaagtagccgc

SEQ ID NO: 7217 - DNA, 22 bp, Artificial Sequence
  Description of Artificial Sequence: Synthetic oligonucleotide
ttcttaagacatccaacaagca

SEQ ID NO: 7218 - DNA, 22 bp, Artificial Sequence
  Description of Artificial Sequence: Synthetic oligonucleotide
ttcagaatggatacaatggcct

SEQ ID NO: 7219 - DNA, 22 bp, Artificial Sequence
  Description of Artificial Sequence: Synthetic oligonucleotide
ttagaacttccatccaaagcga

SEQ ID NO: 7220 - DNA, 22 bp, Artificial Sequence
  Description of Artificial Sequence: Synthetic oligonucleotide
tattacctaatgcaattctgcg

SEQ ID NO: 7221 - DNA, 22 bp, Artificial Sequence
  Description of Artificial Sequence: Synthetic oligonucleotide
aactacaatatcaggagctggt

SEQ ID NO: 7222 - DNA, 22 bp, Artificial Sequence
  Description of Artificial Sequence: Synthetic oligonucleotide
ataagatttacagaagtttcca

SEQ ID NO: 7223 - DNA, 22 bp, Artificial Sequence
  Description of Artificial Sequence: Synthetic oligonucleotide
tttgccttcagcattcttggcc

SEQ ID NO: 7224 - DNA, 22 bp, Artificial Sequence
  Description of Artificial Sequence: Synthetic oligonucleotide
attattctgcagcatttatggg

SEQ ID NO: 7225 - DNA, 22 bp, Artificial Sequence
  Description of Artificial Sequence: Synthetic oligonucleotide
atttaaggcgaatctcttagcc

SEQ ID NO: 7226 - DNA, 22 bp, Artificial Sequence
  Description of Artificial Sequence: Synthetic oligonucleotide
aataggtttgtgtctcagtggc

SEQ ID NO: 7227 - DNA, 22 bp, Artificial Sequence
  Description of Artificial Sequence: Synthetic oligonucleotide
atacagcagaataaacattcct

SEQ ID NO: 7228 - DNA, 22 bp, Artificial Sequence
  Description of Artificial Sequence: Synthetic oligonucleotide
tatttgtgaaatatgaactcca

SEQ ID NO: 7229 - DNA, 22 bp, Artificial Sequence
  Description of Artificial Sequence: Synthetic oligonucleotide
ttatctaaagcattcataacca

SEQ ID NO: 7230 - DNA, 22 bp, Artificial Sequence
  Description of Artificial Sequence: Synthetic oligonucleotide
atttcattccttcggatctcca

SEQ ID NO: 7231 - DNA, 22 bp, Artificial Sequence
  Description of Artificial Sequence: Synthetic oligonucleotide
tattctggaaatttgatacgga

SEQ ID NO: 7232 - DNA, 22 bp, Artificial Sequence
  Description of Artificial Sequence: Synthetic oligonucleotide
tttcctaaagtgcttaggcgga

SEQ ID NO: 7233 - DNA, 22 bp, Artificial Sequence
  Description of Artificial Sequence: Synthetic oligonucleotide
atttatctgcttaatacaaggt

SEQ ID NO: 7234 - DNA, 22 bp, Artificial Sequence
  Description of Artificial Sequence: Synthetic oligonucleotide
tttaattagggactgtaaacgc

SEQ ID NO: 7235 - DNA, 22 bp, Artificial Sequence
  Description of Artificial Sequence: Synthetic oligonucleotide
taacaattccataatgaaaggc

SEQ ID NO: 7236 - DNA, 22 bp, Artificial Sequence
  Description of Artificial Sequence: Synthetic oligonucleotide
tatgtgattgataatggatggc

SEQ ID NO: 7237 - DNA, 22 bp, Artificial Sequence
  Description of Artificial Sequence: Synthetic oligonucleotide
taaaggcaggagaggaacagcg

SEQ ID NO: 7238 - DNA, 22 bp, Artificial Sequence
  Description of Artificial Sequence: Synthetic oligonucleotide
ttctcgtagcaggtatttccca

SEQ ID NO: 7239 - DNA, 22 bp, Artificial Sequence
  Description of Artificial Sequence: Synthetic oligonucleotide
aattgtttagagagtccagcca

SEQ ID NO: 7240 - DNA, 22 bp, Artificial Sequence
  Description of Artificial Sequence: Synthetic oligonucleotide
aattgaagttggagacaatgac

SEQ ID NO: 7241 - DNA, 22 bp, Artificial Sequence
  Description of Artificial Sequence: Synthetic oligonucleotide
aatgtgtatgggtgaaagggct

SEQ ID NO: 7242 - DNA, 22 bp, Artificial Sequence
  Description of Artificial Sequence: Synthetic oligonucleotide
ttctttcttcagtgactctgca

SEQ ID NO: 7243 - DNA, 22 bp, Artificial Sequence
  Description of Artificial Sequence: Synthetic oligonucleotide
tttaaggtggaattgctcagct

SEQ ID NO: 7244 - DNA, 22 bp, Artificial Sequence
  Description of Artificial Sequence: Synthetic oligonucleotide
tttcaggtctatattcaatggc

SEQ ID NO: 7245 - DNA, 22 bp, Artificial Sequence
  Description of Artificial Sequence: Synthetic oligonucleotide
ataatacaggagagcagctcca

SEQ ID NO: 7246 - DNA, 22 bp, Artificial Sequence
  Description of Artificial Sequence: Synthetic oligonucleotide
tattgactgaagaggaagtgct

SEQ ID NO: 7247 - DNA, 22 bp, Artificial Sequence
  Description of Artificial Sequence: Synthetic oligonucleotide
tatttcagagctactgtagccc

SEQ ID NO: 7248 - DNA, 22 bp, Artificial Sequence
  Description of Artificial Sequence: Synthetic oligonucleotide
tttaacatctttcttatctccg

SEQ ID NO: 7249 - DNA, 22 bp, Artificial Sequence
  Description of Artificial Sequence: Synthetic oligonucleotide
tagaaagatatcactgttgctt

SEQ ID NO: 7250 - DNA, 22 bp, Artificial Sequence
  Description of Artificial Sequence: Synthetic oligonucleotide
ttatttcttgtaagcggctccc

SEQ ID NO: 7251 - DNA, 22 bp, Artificial Sequence
  Description of Artificial Sequence: Synthetic oligonucleotide
tttgtttacagcatccatcgct

SEQ ID NO: 7252 - DNA, 22 bp, Artificial Sequence
  Description of Artificial Sequence: Synthetic oligonucleotide
aatttaaatggaaattgtccgt

SEQ ID NO: 7253 - DNA, 22 bp, Artificial Sequence
  Description of Artificial Sequence: Synthetic oligonucleotide
aagttacaagtaggtcgaagcc

SEQ ID NO: 7254 - DNA, 22 bp, Artificial Sequence
  Description of Artificial Sequence: Synthetic oligonucleotide
ttcttacaaaggcctcttgcag

SEQ ID NO: 7255 - DNA, 22 bp, Artificial Sequence
  Description of Artificial Sequence: Synthetic oligonucleotide
tttaaatatggaaatacaggct

SEQ ID NO: 7256 - DNA, 22 bp, Artificial Sequence
  Description of Artificial Sequence: Synthetic oligonucleotide
tttcatcagccatttcttggcg

SEQ ID NO: 7257 - DNA, 22 bp, Artificial Sequence
  Description of Artificial Sequence: Synthetic oligonucleotide
atatctggcagaagtaatacct

SEQ ID NO: 7258 - DNA, 22 bp, Artificial Sequence
  Description of Artificial Sequence: Synthetic oligonucleotide
atacttactacttgtttctgtt

SEQ ID NO: 7259 - DNA, 22 bp, Artificial Sequence
  Description of Artificial Sequence: Synthetic oligonucleotide
ttatatattaggacaatcaggt

SEQ ID NO: 7260 - DNA, 22 bp, Artificial Sequence
  Description of Artificial Sequence: Synthetic oligonucleotide
tttcagtggaaaggaaggaggg

SEQ ID NO: 7261 - DNA, 22 bp, Artificial Sequence
  Description of Artificial Sequence: Synthetic oligonucleotide
ataaagatattctgctgctcct

SEQ ID NO: 7262 - DNA, 22 bp, Artificial Sequence
  Description of Artificial Sequence: Synthetic oligonucleotide
tatagagtgcaaatgatttgct

SEQ ID NO: 7263 - DNA, 22 bp, Artificial Sequence
  Description of Artificial Sequence: Synthetic oligonucleotide
atgaaactgaacagtggatcgt

SEQ ID NO: 7264 - DNA, 22 bp, Artificial Sequence
  Description of Artificial Sequence: Synthetic oligonucleotide
tactgcaataatcagaagggct

SEQ ID NO: 7265 - DNA, 22 bp, Artificial Sequence
  Description of Artificial Sequence: Synthetic oligonucleotide
tattattatctgtaaggtggca

SEQ ID NO: 7266 - DNA, 22 bp, Artificial Sequence
  Description of Artificial Sequence: Synthetic oligonucleotide
ttagcagctttggatgacagcc

SEQ ID NO: 7267 - DNA, 22 bp, Artificial Sequence
  Description of Artificial Sequence: Synthetic oligonucleotide
ttaattcactagtgtaggcgga

SEQ ID NO: 7268 - DNA, 22 bp, Artificial Sequence
  Description of Artificial Sequence: Synthetic oligonucleotide
ttaatatttgtagctacatgcc

SEQ ID NO: 7269 - DNA, 22 bp, Artificial Sequence
  Description of Artificial Sequence: Synthetic oligonucleotide
tttaatattcatggcctctgct

SEQ ID NO: 7270 - DNA, 22 bp, Artificial Sequence
  Description of Artificial Sequence: Synthetic oligonucleotide
tagactcatcccagtctgcgga

SEQ ID NO: 7271 - DNA, 22 bp, Artificial Sequence
  Description of Artificial Sequence: Synthetic oligonucleotide
atttatgtcacaattctgaccc

SEQ ID NO: 7272 - DNA, 22 bp, Artificial Sequence
  Description of Artificial Sequence: Synthetic oligonucleotide
tttcctgaaagtagatagcggt

SEQ ID NO: 7273 - DNA, 22 bp, Artificial Sequence
  Description of Artificial Sequence: Synthetic oligonucleotide
tttcttctagtaagaaatcccg

SEQ ID NO: 7274 - DNA, 22 bp, Artificial Sequence
  Description of Artificial Sequence: Synthetic oligonucleotide
ttagttctccacggtataaggg

SEQ ID NO: 7275 - DNA, 22 bp, Artificial Sequence
  Description of Artificial Sequence: Synthetic oligonucleotide
ttaccttctcagctataatcct

SEQ ID NO: 7276 - DNA, 22 bp, Artificial Sequence
  Description of Artificial Sequence: Synthetic oligonucleotide
atttcattaggtttgatgggcc

SEQ ID NO: 7277 - DNA, 22 bp, Artificial Sequence
  Description of Artificial Sequence: Synthetic oligonucleotide
taaagatttaacaggtctgcct

SEQ ID NO: 7278 - DNA, 22 bp, Artificial Sequence
  Description of Artificial Sequence: Synthetic oligonucleotide
ataatagatttccaaagctgct

SEQ ID NO: 7279 - DNA, 22 bp, Artificial Sequence
  Description of Artificial Sequence: Synthetic oligonucleotide
tttcctcaactcaagattaggg

SEQ ID NO: 7280 - DNA, 22 bp, Artificial Sequence
  Description of Artificial Sequence: Synthetic oligonucleotide
atttctttacgacacaatgggc

SEQ ID NO: 7281 - DNA, 22 bp, Artificial Sequence
  Description of Artificial Sequence: Synthetic oligonucleotide
aatttccaccttacagacaggc

SEQ ID NO: 7282 - DNA, 22 bp, Artificial Sequence
  Description of Artificial Sequence: Synthetic oligonucleotide
taatatttgtagctacatgcca

SEQ ID NO: 7283 - DNA, 22 bp, Artificial Sequence
  Description of Artificial Sequence: Synthetic oligonucleotide
tagtttcataattggagacgct

SEQ ID NO: 7284 - DNA, 22 bp, Artificial Sequence
  Description of Artificial Sequence: Synthetic oligonucleotide
tatttacatattatatgtccga

SEQ ID NO: 7285 - DNA, 22 bp, Artificial Sequence
  Description of Artificial Sequence: Synthetic oligonucleotide
atatttaggacacttcagagca

SEQ ID NO: 7286 - DNA, 22 bp, Artificial Sequence
  Description of Artificial Sequence: Synthetic oligonucleotide
atttggaaagagagcaaaggct

SEQ ID NO: 7287 - DNA, 22 bp, Artificial Sequence
  Description of Artificial Sequence: Synthetic oligonucleotide
tttagtcaacaaagcaggtcca

SEQ ID NO: 7288 - DNA, 22 bp, Artificial Sequence
  Description of Artificial Sequence: Synthetic oligonucleotide
ttgtctgctaatatagtccgca

SEQ ID NO: 7289 - DNA, 22 bp, Artificial Sequence
  Description of Artificial Sequence: Synthetic oligonucleotide
tatcctgaagattacgcttgct

SEQ ID NO: 7290 - DNA, 22 bp, Artificial Sequence
  Description of Artificial Sequence: Synthetic oligonucleotide
atcaatttagagaaacaaaccc

SEQ ID NO: 7291 - DNA, 22 bp, Artificial Sequence
  Description of Artificial Sequence: Synthetic oligonucleotide
attaagcatggcttgattccct

SEQ ID NO: 7292 - DNA, 22 bp, Artificial Sequence
  Description of Artificial Sequence: Synthetic oligonucleotide
ttaaactcacttgtattcacct

SEQ ID NO: 7293 - DNA, 22 bp, Artificial Sequence
  Description of Artificial Sequence: Synthetic oligonucleotide
tatttaggtggcagaagaaggc

SEQ ID NO: 7294 - DNA, 22 bp, Artificial Sequence
  Description of Artificial Sequence: Synthetic oligonucleotide
atataacagaagccgattaggg

SEQ ID NO: 7295 - DNA, 22 bp, Artificial Sequence
  Description of Artificial Sequence: Synthetic oligonucleotide
atgaaatctaatatatttagca

SEQ ID NO: 7296 - DNA, 22 bp, Artificial Sequence
  Description of Artificial Sequence: Synthetic oligonucleotide
tacactatgtacagactctgcg

SEQ ID NO: 7297 - DNA, 22 bp, Artificial Sequence
  Description of Artificial Sequence: Synthetic oligonucleotide
atataatctccattggaagcca

SEQ ID NO: 7298 - DNA, 22 bp, Artificial Sequence
  Description of Artificial Sequence: Synthetic oligonucleotide
attaggatggtcactgacaggc

SEQ ID NO: 7299 - DNA, 22 bp, Artificial Sequence
  Description of Artificial Sequence: Synthetic oligonucleotide
ttcagatttcggtgtgtctgcc

SEQ ID NO: 7300 - DNA, 22 bp, Artificial Sequence
  Description of Artificial Sequence: Synthetic oligonucleotide
ataaaccaccttataggtaggt

SEQ ID NO: 7301 - DNA, 22 bp, Artificial Sequence
  Description of Artificial Sequence: Synthetic oligonucleotide
ataatatctaatattccaagct

SEQ ID NO: 7302 - DNA, 22 bp, Artificial Sequence
  Description of Artificial Sequence: Synthetic oligonucleotide
atcaaagagcaaacaagttccg

SEQ ID NO: 7303 - DNA, 22 bp, Artificial Sequence
  Description of Artificial Sequence: Synthetic oligonucleotide
ataaagttactgttggcgagct

SEQ ID NO: 7304 - DNA, 22 bp, Artificial Sequence
  Description of Artificial Sequence: Synthetic oligonucleotide
ttgatgataacttctgtgccct

SEQ ID NO: 7305 - DNA, 22 bp, Artificial Sequence
  Description of Artificial Sequence: Synthetic oligonucleotide
ttgagcattgcctttgattgct

SEQ ID NO: 7306 - DNA, 22 bp, Artificial Sequence
  Description of Artificial Sequence: Synthetic oligonucleotide
tttctaataactgttgaagccc

SEQ ID NO: 7307 - DNA, 22 bp, Artificial Sequence
  Description of Artificial Sequence: Synthetic oligonucleotide
tatttcggaagaggtgcgtggc

SEQ ID NO: 7308 - DNA, 22 bp, Artificial Sequence
  Description of Artificial Sequence: Synthetic oligonucleotide
atatgataacgaggtgaaagcc

SEQ ID NO: 7309 - DNA, 22 bp, Artificial Sequence
  Description of Artificial Sequence: Synthetic oligonucleotide
atatagtccgcatttccaggcc

SEQ ID NO: 7310 - DNA, 22 bp, Artificial Sequence
  Description of Artificial Sequence: Synthetic oligonucleotide
aatctctagaattatcagaggt

SEQ ID NO: 7311 - DNA, 22 bp, Artificial Sequence
  Description of Artificial Sequence: Synthetic oligonucleotide
aactgaaagcagaaacactgga

SEQ ID NO: 7312 - DNA, 22 bp, Artificial Sequence
  Description of Artificial Sequence: Synthetic oligonucleotide
ttctcaaatcatgttagaaggg

SEQ ID NO: 7313 - DNA, 22 bp, Artificial Sequence
  Description of Artificial Sequence: Synthetic oligonucleotide
tattaagagagtctgtgctgcc

SEQ ID NO: 7314 - DNA, 22 bp, Artificial Sequence
  Description of Artificial Sequence: Synthetic oligonucleotide
ataaatttcacaactggaggag

SEQ ID NO: 7315 - DNA, 22 bp, Artificial Sequence
  Description of Artificial Sequence: Synthetic oligonucleotide
taaatatacacaagtatttcca

SEQ ID NO: 7316 - DNA, 22 bp, Artificial Sequence
  Description of Artificial Sequence: Synthetic oligonucleotide
tttgccaaaggtgtgatctccc

SEQ ID NO: 7317 - DNA, 22 bp, Artificial Sequence
  Description of Artificial Sequence: Synthetic oligonucleotide
tatattagagatcatttgtgca

SEQ ID NO: 7318 - DNA, 22 bp, Artificial Sequence
  Description of Artificial Sequence: Synthetic oligonucleotide
tagaaagttggattaatgtgct

SEQ ID NO: 7319 - DNA, 22 bp, Artificial Sequence
  Description of Artificial Sequence: Synthetic oligonucleotide
taattctcaggcttgactaggc

SEQ ID NO: 7320 - DNA, 22 bp, Artificial Sequence
  Description of Artificial Sequence: Synthetic oligonucleotide
aatatgaatattatagtctgct

SEQ ID NO: 7321 - DNA, 22 bp, Artificial Sequence
  Description of Artificial Sequence: Synthetic oligonucleotide
taacggtgagctcgtagaggca

SEQ ID NO: 7322 - DNA, 22 bp, Artificial Sequence
  Description of Artificial Sequence: Synthetic oligonucleotide
taagactatgagagagaaaggg

SEQ ID NO: 7323 - DNA, 22 bp, Artificial Sequence
  Description of Artificial Sequence: Synthetic oligonucleotide
tattccactaccaaagtaggtc

SEQ ID NO: 7324 - DNA, 22 bp, Artificial Sequence
  Description of Artificial Sequence: Synthetic oligonucleotide
taaactatgaggatggtcccgc

SEQ ID NO: 7325 - DNA, 22 bp, Artificial Sequence
  Description of Artificial Sequence: Synthetic oligonucleotide
atacagtgttccaatagctggg

SEQ ID NO: 7326 - DNA, 22 bp, Artificial Sequence
  Description of Artificial Sequence: Synthetic oligonucleotide
ttaggaggtaaacaaaggacca

SEQ ID NO: 7327 - DNA, 22 bp, Artificial Sequence
  Description of Artificial Sequence: Synthetic oligonucleotide
ttacaaagaaattatactaggt

SEQ ID NO: 7328 - DNA, 22 bp, Artificial Sequence
  Description of Artificial Sequence: Synthetic oligonucleotide
ataaattatcttcttaatcgca

SEQ ID NO: 7329 - DNA, 22 bp, Artificial Sequence
  Description of Artificial Sequence: Synthetic oligonucleotide
aactcggcaagtttattctggt

SEQ ID NO: 7330 - DNA, 22 bp, Artificial Sequence
  Description of Artificial Sequence: Synthetic oligonucleotide
tatatttatcacttaatgtcgt

SEQ ID NO: 7331 - DNA, 22 bp, Artificial Sequence
  Description of Artificial Sequence: Synthetic oligonucleotide
ttaagttgtgttctgaaagcct

SEQ ID NO: 7332 - DNA, 22 bp, Artificial Sequence
  Description of Artificial Sequence: Synthetic oligonucleotide
taacaggtgtatttctcgggca

SEQ ID NO: 7333 - DNA, 22 bp, Artificial Sequence
  Description of Artificial Sequence: Synthetic oligonucleotide
taaggttgtagtcctcagtggt

SEQ ID NO: 7334 - DNA, 22 bp, Artificial Sequence
  Description of Artificial Sequence: Synthetic oligonucleotide
catctttaaccagtattctggc

SEQ ID NO: 7335 - DNA, 22 bp, Artificial Sequence
  Description of Artificial Sequence: Synthetic oligonucleotide
aatcactgagtgtctatcagct

SEQ ID NO: 7336 - DNA, 22 bp, Artificial Sequence
  Description of Artificial Sequence: Synthetic oligonucleotide
tttaaattccattctttctgat

SEQ ID NO: 7337 - DNA, 22 bp, Artificial Sequence
  Description of Artificial Sequence: Synthetic oligonucleotide
tataatgatcctcatataacca

SEQ ID NO: 7338 - DNA, 22 bp, Artificial Sequence
  Description of Artificial Sequence: Synthetic oligonucleotide
taatccctaagacaagaatggc

SEQ ID NO: 7339 - DNA, 22 bp, Artificial Sequence
  Description of Artificial Sequence: Synthetic oligonucleotide
atagctggtgactgaagggcgc

SEQ ID NO: 7340 - DNA, 22 bp, Artificial Sequence
  Description of Artificial Sequence: Synthetic oligonucleotide
taaacatttcccactactggca

SEQ ID NO: 7341 - DNA, 22 bp, Artificial Sequence
  Description of Artificial Sequence: Synthetic oligonucleotide
ttacagttagctgttcatccca

SEQ ID NO: 7342 - DNA, 22 bp, Artificial Sequence
  Description of Artificial Sequence: Synthetic oligonucleotide
tatgttataacttggaataggc

SEQ ID NO: 7343 - DNA, 22 bp, Artificial Sequence
  Description of Artificial Sequence: Synthetic oligonucleotide
ttgattaagcgaggattgtggt

SEQ ID NO: 7344 - DNA, 22 bp, Artificial Sequence
  Description of Artificial Sequence: Synthetic oligonucleotide
ttctgaaggtatattaggtgga

SEQ ID NO: 7345 - DNA, 22 bp, Artificial Sequence
  Description of Artificial Sequence: Synthetic oligonucleotide
ttatagaataaatgcactcgga

SEQ ID NO: 7346 - DNA, 22 bp, Artificial Sequence
  Description of Artificial Sequence: Synthetic oligonucleotide
tttaggatcagatttatctgct

SEQ ID NO: 7347 - DNA, 22 bp, Artificial Sequence
  Description of Artificial Sequence: Synthetic oligonucleotide
tattgaatttcatgtgtgtgca

SEQ ID NO: 7348 - DNA, 22 bp, Artificial Sequence
  Description of Artificial Sequence: Synthetic oligonucleotide
taaacaaaggaccaacatagcc

SEQ ID NO: 7349 - DNA, 22 bp, Artificial Sequence
  Description of Artificial Sequence: Synthetic oligonucleotide
ttaggatgggatccatcttccc

SEQ ID NO: 7350 - DNA, 22 bp, Artificial Sequence
  Description of Artificial Sequence: Synthetic oligonucleotide
tttcagaaacggaaggagagga

SEQ ID NO: 7351 - DNA, 22 bp, Artificial Sequence
  Description of Artificial Sequence: Synthetic oligonucleotide
tttctcataaggtgtgttggct

SEQ ID NO: 7352 - DNA, 22 bp, Artificial Sequence
  Description of Artificial Sequence: Synthetic oligonucleotide
ttcgggcccatgatggtggcct

SEQ ID NO: 7353 - DNA, 22 bp, Artificial Sequence
  Description of Artificial Sequence: Synthetic oligonucleotide
ttaagttcttgatggacaaggg

SEQ ID NO: 7354 - DNA, 22 bp, Artificial Sequence
  Description of Artificial Sequence: Synthetic oligonucleotide
ttaatattagaacaactacgga

SEQ ID NO: 7355 - DNA, 22 bp, Artificial Sequence
  Description of Artificial Sequence: Synthetic oligonucleotide
ttaaataaactaagacgccgct

SEQ ID NO: 7356 - DNA, 22 bp, Artificial Sequence
  Description of Artificial Sequence: Synthetic oligonucleotide
ttgtgcaaaggttcttaatgca

SEQ ID NO: 7357 - DNA, 22 bp, Artificial Sequence
  Description of Artificial Sequence: Synthetic oligonucleotide
taatttctttaattacatcgca

SEQ ID NO: 7358 - DNA, 22 bp, Artificial Sequence
  Description of Artificial Sequence: Synthetic oligonucleotide
atatttactcagcaaatgagcc

SEQ ID NO: 7359 - DNA, 22 bp, Artificial Sequence
  Description of Artificial Sequence: Synthetic oligonucleotide
attatctattccattcgtgcct

SEQ ID NO: 7360 - DNA, 22 bp, Artificial Sequence
  Description of Artificial Sequence: Synthetic oligonucleotide
tttgagcacaggaattgtgccc

SEQ ID NO: 7361 - DNA, 22 bp, Artificial Sequence
  Description of Artificial Sequence: Synthetic oligonucleotide
tttatgtccttctggatccgca

SEQ ID NO: 7362 - DNA, 22 bp, Artificial Sequence
  Description of Artificial Sequence: Synthetic oligonucleotide
ttatacactgttaacgtagggc

SEQ ID NO: 7363 - DNA, 22 bp, Artificial Sequence
  Description of Artificial Sequence: Synthetic oligonucleotide
tttaaataccctgtccagatag

SEQ ID NO: 7364 - DNA, 22 bp, Artificial Sequence
  Description of Artificial Sequence: Synthetic oligonucleotide
ataagatacactgtgaccagca

SEQ ID NO: 7365 - DNA, 22 bp, Artificial Sequence
  Description of Artificial Sequence: Synthetic oligonucleotide
tcaaagtgactcagaatctggc

SEQ ID NO: 7366 - DNA, 22 bp, Artificial Sequence
  Description of Artificial Sequence: Synthetic oligonucleotide
atacaagctcatggatgagctg

SEQ ID NO: 7367 - DNA, 22 bp, Artificial Sequence
  Description of Artificial Sequence: Synthetic oligonucleotide
attgagattacttctagcacca

SEQ ID NO: 7368 - DNA, 22 bp, Artificial Sequence
  Description of Artificial Sequence: Synthetic oligonucleotide
attgtaccaaagtgacggccgc

SEQ ID NO: 7369 - DNA, 22 bp, Artificial Sequence
  Description of Artificial Sequence: Synthetic oligonucleotide
taaagagaagccatgttatcct

SEQ ID NO: 7370 - DNA, 22 bp, Artificial Sequence
  Description of Artificial Sequence: Synthetic oligonucleotide
cacctctaatacattgtctgga

SEQ ID NO: 7371 - DNA, 22 bp, Artificial Sequence
  Description of Artificial Sequence: Synthetic oligonucleotide
taatgtgttaagaacttcaccc

SEQ ID NO: 7372 - DNA, 22 bp, Artificial Sequence
  Description of Artificial Sequence: Synthetic oligonucleotide
ttgaaactaaaggcgctttccg

SEQ ID NO: 7373 - DNA, 22 bp, Artificial Sequence
  Description of Artificial Sequence: Synthetic oligonucleotide
taatacttacctttacacactg

SEQ ID NO: 7374 - DNA, 22 bp, Artificial Sequence
  Description of Artificial Sequence: Synthetic oligonucleotide
tttaagactgctgtgaaaggtg

SEQ ID NO: 7375 - DNA, 22 bp, Artificial Sequence
  Description of Artificial Sequence: Synthetic oligonucleotide
atactgaaatatattgattgcc

SEQ ID NO: 7376 - DNA, 22 bp, Artificial Sequence
  Description of Artificial Sequence: Synthetic oligonucleotide
tatgtccagactatccaggcgt

SEQ ID NO: 7377 - DNA, 22 bp, Artificial Sequence
  Description of Artificial Sequence: Synthetic oligonucleotide
ttgacaaagaagaataaggcgt

SEQ ID NO: 7378 - DNA, 22 bp, Artificial Sequence
  Description of Artificial Sequence: Synthetic oligonucleotide
aatgaatattaagaacataccc

SEQ ID NO: 7379 - DNA, 22 bp, Artificial Sequence
  Description of Artificial Sequence: Synthetic oligonucleotide
attcttaatggtaaccttgcct

SEQ ID NO: 7380 - DNA, 22 bp, Artificial Sequence
  Description of Artificial Sequence: Synthetic oligonucleotide
attagttacgaaggttaacgct

SEQ ID NO: 7381 - DNA, 22 bp, Artificial Sequence
  Description of Artificial Sequence: Synthetic oligonucleotide
ttgttctctagaagtccctggt

SEQ ID NO: 7382 - DNA, 22 bp, Artificial Sequence
  Description of Artificial Sequence: Synthetic oligonucleotide
atatttagaatttgagaaaccc

SEQ ID NO: 7383 - DNA, 22 bp, Artificial Sequence
  Description of Artificial Sequence: Synthetic oligonucleotide
tttatgcattccattctgagct

SEQ ID NO: 7384 - DNA, 22 bp, Artificial Sequence
  Description of Artificial Sequence: Synthetic oligonucleotide
atattaatacttaacaaagccc

SEQ ID NO: 7385 - DNA, 22 bp, Artificial Sequence
  Description of Artificial Sequence: Synthetic oligonucleotide
attgctccaagaactgggagcc

SEQ ID NO: 7386 - DNA, 22 bp, Artificial Sequence
  Description of Artificial Sequence: Synthetic oligonucleotide
ttagatttcagtcatgcctgga

SEQ ID NO: 7387 - DNA, 22 bp, Artificial Sequence
  Description of Artificial Sequence: Synthetic oligonucleotide
tttaggcggcagtagaaatgga

SEQ ID NO: 7388 - DNA, 22 bp, Artificial Sequence
  Description of Artificial Sequence: Synthetic oligonucleotide
ttagacatagcttacaggtggc

SEQ ID NO: 7389 - DNA, 22 bp, Artificial Sequence
  Description of Artificial Sequence: Synthetic oligonucleotide
ttcttgttacacattctcctgc

SEQ ID NO: 7390 - DNA, 22 bp, Artificial Sequence
  Description of Artificial Sequence: Synthetic oligonucleotide
atctcattccacagcgtacctc

SEQ ID NO: 7391 - DNA, 22 bp, Artificial Sequence
  Description of Artificial Sequence: Synthetic oligonucleotide
ttctggatgaagaggtagcgct

SEQ ID NO: 7392 - DNA, 22 bp, Artificial Sequence
  Description of Artificial Sequence: Synthetic oligonucleotide
tttctatctcattccacagcgt

SEQ ID NO: 7393 - DNA, 22 bp, Artificial Sequence
  Description of Artificial Sequence: Synthetic oligonucleotide
attcatcttgagataatgtcca

SEQ ID NO: 7394 - DNA, 22 bp, Artificial Sequence
  Description of Artificial Sequence: Synthetic oligonucleotide
atcttgtaggcgtaacgatccc

SEQ ID NO: 7395 - DNA, 22 bp, Artificial Sequence
  Description of Artificial Sequence: Synthetic oligonucleotide
attgttagtgctgctatgacca

SEQ ID NO: 7396 - DNA, 22 bp, Artificial Sequence
  Description of Artificial Sequence: Synthetic oligonucleotide
attcaagacccaacaggttggc

SEQ ID NO: 7397 - DNA, 22 bp, Artificial Sequence
  Description of Artificial Sequence: Synthetic oligonucleotide
atatcttcaaactttcctggca

SEQ ID NO: 7398 - DNA, 22 bp, Artificial Sequence
  Description of Artificial Sequence: Synthetic oligonucleotide
tttccctgacactgatacagcg

SEQ ID NO: 7399 - DNA, 22 bp, Artificial Sequence
  Description of Artificial Sequence: Synthetic oligonucleotide
ttgaactttggcataggctccc

SEQ ID NO: 7400 - DNA, 22 bp, Artificial Sequence
  Description of Artificial Sequence: Synthetic oligonucleotide
tattattctcaggcaaagaggt

SEQ ID NO: 7401 - DNA, 22 bp, Artificial Sequence
  Description of Artificial Sequence: Synthetic oligonucleotide
tttatttctcgtcctaggtgga

SEQ ID NO: 7402 - DNA, 22 bp, Artificial Sequence
  Description of Artificial Sequence: Synthetic oligonucleotide
atatattatcatataggtacct

SEQ ID NO: 7403 - DNA, 22 bp, Artificial Sequence
  Description of Artificial Sequence: Synthetic oligonucleotide
ttattcttatatttgtacagct

SEQ ID NO: 7404 - DNA, 22 bp, Artificial Sequence
  Description of Artificial Sequence: Synthetic oligonucleotide
atcgtgtattgaggtgtgccgc

SEQ ID NO: 7405 - DNA, 22 bp, Artificial Sequence
  Description of Artificial Sequence: Synthetic oligonucleotide
tttgacagaactgaaagagcaa

SEQ ID NO: 7406 - DNA, 22 bp, Artificial Sequence
  Description of Artificial Sequence: Synthetic oligonucleotide
atcaaatctttcaggtactgga

SEQ ID NO: 7407 - DNA, 22 bp, Artificial Sequence
  Description of Artificial Sequence: Synthetic oligonucleotide
taatttcttatcgatagctcct

SEQ ID NO: 7408 - DNA, 22 bp, Artificial Sequence
  Description of Artificial Sequence: Synthetic oligonucleotide
aactcttcccaggcaatttgca

SEQ ID NO: 7409 - DNA, 22 bp, Artificial Sequence
  Description of Artificial Sequence: Synthetic oligonucleotide
tttaaatactggtcccatcggg

SEQ ID NO: 7410 - DNA, 22 bp, Artificial Sequence
  Description of Artificial Sequence: Synthetic oligonucleotide
atttccaaaggaagcatccctg

SEQ ID NO: 7411 - DNA, 22 bp, Artificial Sequence
  Description of Artificial Sequence: Synthetic oligonucleotide
atattcatccacatcaaatgtc

SEQ ID NO: 7412 - DNA, 22 bp, Artificial Sequence
  Description of Artificial Sequence: Synthetic oligonucleotide
taaatagattactgcataggca

SEQ ID NO: 7413 - DNA, 22 bp, Artificial Sequence
  Description of Artificial Sequence: Synthetic oligonucleotide
taatggaataggatttctacca

SEQ ID NO: 7414 - DNA, 22 bp, Artificial Sequence
  Description of Artificial Sequence: Synthetic oligonucleotide
tttactaatcagaaaggtcggt

SEQ ID NO: 7415 - DNA, 22 bp, Artificial Sequence
  Description of Artificial Sequence: Synthetic oligonucleotide
atatcctttgggatagtccggc

SEQ ID NO: 7416 - DNA, 22 bp, Artificial Sequence
  Description of Artificial Sequence: Synthetic oligonucleotide
atatacaactacacagtcctaa

SEQ ID NO: 7417 - DNA, 22 bp, Artificial Sequence
  Description of Artificial Sequence: Synthetic oligonucleotide
ttaacaagtgacagtgccgcag

SEQ ID NO: 7418 - DNA, 22 bp, Artificial Sequence
  Description of Artificial Sequence: Synthetic oligonucleotide
ctttacacagactctaactgga

SEQ ID NO: 7419 - DNA, 22 bp, Artificial Sequence
  Description of Artificial Sequence: Synthetic oligonucleotide
attacaattaagagtcgggccc

SEQ ID NO: 7420 - DNA, 22 bp, Artificial Sequence
  Description of Artificial Sequence: Synthetic oligonucleotide
taaagggaagctgtggacagga

SEQ ID NO: 7421 - DNA, 22 bp, Artificial Sequence
  Description of Artificial Sequence: Synthetic oligonucleotide
ctgagttaggaggctagcagga

SEQ ID NO: 7422 - DNA, 22 bp, Artificial Sequence
  Description of Artificial Sequence: Synthetic oligonucleotide
ttactacaacgcttaattcctt

SEQ ID NO: 7423 - DNA, 22 bp, Artificial Sequence
  Description of Artificial Sequence: Synthetic oligonucleotide
ttataatctctactggtgactc

SEQ ID NO: 7424 - DNA, 22 bp, Artificial Sequence
  Description of Artificial Sequence: Synthetic oligonucleotide
ttattggagctgacatcaagct

SEQ ID NO: 7425 - DNA, 22 bp, Artificial Sequence
  Description of Artificial Sequence: Synthetic oligonucleotide
taaataaatccacgacagactt

SEQ ID NO: 7426 - DNA, 22 bp, Artificial Sequence
  Description of Artificial Sequence: Synthetic oligonucleotide
ttacaagtgctgatgaagagct

SEQ ID NO: 7427 - DNA, 22 bp, Artificial Sequence
  Description of Artificial Sequence: Synthetic oligonucleotide
taatcccaggaatggttctcag

SEQ ID NO: 7428 - DNA, 22 bp, Artificial Sequence
  Description of Artificial Sequence: Synthetic oligonucleotide
tgattccaacatgatatgactg

SEQ ID NO: 7429 - DNA, 22 bp, Artificial Sequence
  Description of Artificial Sequence: Synthetic oligonucleotide
taaagagatgacaagcattgct

SEQ ID NO: 7430 - DNA, 22 bp, Artificial Sequence
  Description of Artificial Sequence: Synthetic oligonucleotide
taatgcagtaacaataatctga

SEQ ID NO: 7431 - DNA, 22 bp, Artificial Sequence
  Description of Artificial Sequence: Synthetic oligonucleotide
atctgttcaaagagtttggcat

SEQ ID NO: 7432 - DNA, 22 bp, Artificial Sequence
  Description of Artificial Sequence: Synthetic oligonucleotide
gtagtacagcagattctctggc

SEQ ID NO: 7433 - DNA, 22 bp, Artificial Sequence
  Description of Artificial Sequence: Synthetic oligonucleotide
cttatctagagctgtatctcct

SEQ ID NO: 7434 - DNA, 22 bp, Artificial Sequence
  Description of Artificial Sequence: Synthetic oligonucleotide
ttatcttctgccaggatcacct

SEQ ID NO: 7435 - DNA, 22 bp, Artificial Sequence
  Description of Artificial Sequence: Synthetic oligonucleotide
cttgctgtagggcttctgggcc

SEQ ID NO: 7436 - DNA, 22 bp, Artificial Sequence
  Description of Artificial Sequence: Synthetic oligonucleotide
attaaacaacatttacgtgtct

SEQ ID NO: 7437 - DNA, 22 bp, Artificial Sequence
  Description of Artificial Sequence: Synthetic oligonucleotide
ataacttacaatcccaagtgct

SEQ ID NO: 7438 - DNA, 22 bp, Artificial Sequence
  Description of Artificial Sequence: Synthetic oligonucleotide
taaccgtaagccgaggtgtggg

SEQ ID NO: 7439 - DNA, 22 bp, Artificial Sequence
  Description of Artificial Sequence: Synthetic oligonucleotide
tttaatatccagtctgtagctt

SEQ ID NO: 7440 - DNA, 22 bp, Artificial Sequence
  Description of Artificial Sequence: Synthetic oligonucleotide
tatccaaataaggtatatccca

SEQ ID NO: 7441 - DNA, 22 bp, Artificial Sequence
  Description of Artificial Sequence: Synthetic oligonucleotide
atagatatttgaatatggagga

SEQ ID NO: 7442 - DNA, 22 bp, Artificial Sequence
  Description of Artificial Sequence: Synthetic oligonucleotide
tatacatacattataatcaggc

SEQ ID NO: 7443 - DNA, 22 bp, Artificial Sequence
  Description of Artificial Sequence: Synthetic oligonucleotide
tgatctttgcaccctggttgcc

SEQ ID NO: 7444 - DNA, 22 bp, Artificial Sequence
  Description of Artificial Sequence: Synthetic oligonucleotide
aatcagcctcactgtatgtgcc

SEQ ID NO: 7445 - DNA, 22 bp, Artificial Sequence
  Description of Artificial Sequence: Synthetic oligonucleotide
ctataataccttccaagctggg

SEQ ID NO: 7446 - DNA, 22 bp, Artificial Sequence
  Description of Artificial Sequence: Synthetic oligonucleotide
atataacatcattgcatgtgtc

SEQ ID NO: 7447 - DNA, 22 bp, Artificial Sequence
  Description of Artificial Sequence: Synthetic oligonucleotide
atttcataaacccttctagcgt

SEQ ID NO: 7448 - DNA, 22 bp, Artificial Sequence
  Description of Artificial Sequence: Synthetic oligonucleotide
ttcttatatgggctaattagtc

SEQ ID NO: 7449 - DNA, 22 bp, Artificial Sequence
  Description of Artificial Sequence: Synthetic oligonucleotide
aatagactttggagtaagtggc

SEQ ID NO: 7450 - DNA, 22 bp, Artificial Sequence
  Description of Artificial Sequence: Synthetic oligonucleotide
atagccttagataaagctcccg

SEQ ID NO: 7451 - DNA, 22 bp, Artificial Sequence
  Description of Artificial Sequence: Synthetic oligonucleotide
ttaaataccaaagcactcagga

SEQ ID NO: 7452 - DNA, 22 bp, Artificial Sequence
  Description of Artificial Sequence: Synthetic oligonucleotide
tttaatgactctggaatctggt

SEQ ID NO: 7453 - DNA, 22 bp, Artificial Sequence
  Description of Artificial Sequence: Synthetic oligonucleotide
tataataaacatgtcaatagca

SEQ ID NO: 7454 - DNA, 22 bp, Artificial Sequence
  Description of Artificial Sequence: Synthetic oligonucleotide
tttacatctgtgatacatgccg

SEQ ID NO: 7455 - DNA, 22 bp, Artificial Sequence
  Description of Artificial Sequence: Synthetic oligonucleotide
tactactcctgctcttgttggc

SEQ ID NO: 7456 - DNA, 22 bp, Artificial Sequence
  Description of Artificial Sequence: Synthetic oligonucleotide
tttgtacatgcttcaatttgtg

SEQ ID NO: 7457 - DNA, 22 bp, Artificial Sequence
  Description of Artificial Sequence: Synthetic oligonucleotide
atattaggagacgatgtctgct

SEQ ID NO: 7458 - DNA, 22 bp, Artificial Sequence
  Description of Artificial Sequence: Synthetic oligonucleotide
ttaatggagccgctgctggccc

SEQ ID NO: 7459 - DNA, 22 bp, Artificial Sequence
  Description of Artificial Sequence: Synthetic oligonucleotide
aataagaagaaccttctctgtc

SEQ ID NO: 7460 - DNA, 22 bp, Artificial Sequence
  Description of Artificial Sequence: Synthetic oligonucleotide
attaacattgacattaatccac

SEQ ID NO: 7461 - DNA, 22 bp, Artificial Sequence
  Description of Artificial Sequence: Synthetic oligonucleotide
ttaagaaaggtttcctttaggc

SEQ ID NO: 7462 - DNA, 22 bp, Artificial Sequence
  Description of Artificial Sequence: Synthetic oligonucleotide
tttctttccagttctttccggt

SEQ ID NO: 7463 - DNA, 22 bp, Artificial Sequence
  Description of Artificial Sequence: Synthetic oligonucleotide
ttctttcttgccaaacaagcgg

SEQ ID NO: 7464 - DNA, 22 bp, Artificial Sequence
  Description of Artificial Sequence: Synthetic oligonucleotide
atttcttcttccctttcaagga

SEQ ID NO: 7465 - DNA, 22 bp, Artificial Sequence
  Description of Artificial Sequence: Synthetic oligonucleotide
caatacaagcaagtacaaggcc

SEQ ID NO: 7466 - DNA, 22 bp, Artificial Sequence
  Description of Artificial Sequence: Synthetic oligonucleotide
ttattagacccactaagtgcca

SEQ ID NO: 7467 - DNA, 22 bp, Artificial Sequence
  Description of Artificial Sequence: Synthetic oligonucleotide
attctctgagccagttcagcct

SEQ ID NO: 7468 - DNA, 22 bp, Artificial Sequence
  Description of Artificial Sequence: Synthetic oligonucleotide
tattctaaccctaagatcaggg

SEQ ID NO: 7469 - DNA, 22 bp, Artificial Sequence
  Description of Artificial Sequence: Synthetic oligonucleotide
gtgtatatcaaggttaacctgg

SEQ ID NO: 7470 - DNA, 22 bp, Artificial Sequence
  Description of Artificial Sequence: Synthetic oligonucleotide
ttatcctttagtttaggaggct

SEQ ID NO: 7471 - DNA, 22 bp, Artificial Sequence
  Description of Artificial Sequence: Synthetic oligonucleotide
atttcacatgaccattatccgt

SEQ ID NO: 7472 - DNA, 22 bp, Artificial Sequence
  Description of Artificial Sequence: Synthetic oligonucleotide
tttagattcatcatcatctcct

SEQ ID NO: 7473 - DNA, 22 bp, Artificial Sequence
  Description of Artificial Sequence: Synthetic oligonucleotide
atccgttaatagaatgttagct

SEQ ID NO: 7474 - DNA, 22 bp, Artificial Sequence
  Description of Artificial Sequence: Synthetic oligonucleotide
tttagcttgatgatattctgcc

SEQ ID NO: 7475 - DNA, 22 bp, Artificial Sequence
  Description of Artificial Sequence: Synthetic oligonucleotide
tttgaattaatagctatgagct

SEQ ID NO: 7476 - DNA, 22 bp, Artificial Sequence
  Description of Artificial Sequence: Synthetic oligonucleotide
ttcttggttcacacactatggt

SEQ ID NO: 7477 - DNA, 22 bp, Artificial Sequence
  Description of Artificial Sequence: Synthetic oligonucleotide
taaagattcgaacttgatacgc

SEQ ID NO: 7478 - DNA, 22 bp, Artificial Sequence
  Description of Artificial Sequence: Synthetic oligonucleotide
ttaatgagttgtaatagatcct

SEQ ID NO: 7479 - DNA, 22 bp, Artificial Sequence
  Description of Artificial Sequence: Synthetic oligonucleotide
ttctgttatgatattagatgct

SEQ ID NO: 7480 - DNA, 22 bp, Artificial Sequence
  Description of Artificial Sequence: Synthetic oligonucleotide
ataaacattacgatcagctccc

SEQ ID NO: 7481 - DNA, 22 bp, Artificial Sequence
  Description of Artificial Sequence: Synthetic oligonucleotide
tacgatcagctccctatgggtt

SEQ ID NO: 7482 - DNA, 22 bp, Artificial Sequence
  Description of Artificial Sequence: Synthetic oligonucleotide
atcctctttattagtatcaggt

SEQ ID NO: 7483 - DNA, 22 bp, Artificial Sequence
  Description of Artificial Sequence: Synthetic oligonucleotide
aattacttcaatgtagtcaccc

SEQ ID NO: 7484 - DNA, 22 bp, Artificial Sequence
  Description of Artificial Sequence: Synthetic oligonucleotide
aattaaagaaacgttattagac

SEQ ID NO: 7485 - DNA, 22 bp, Artificial Sequence
  Description of Artificial Sequence: Synthetic oligonucleotide
tattcctccaagagtggatgtg

SEQ ID NO: 7486 - DNA, 22 bp, Artificial Sequence
  Description of Artificial Sequence: Synthetic oligonucleotide
tattagtagatgatacactgct

SEQ ID NO: 7487 - DNA, 22 bp, Artificial Sequence
  Description of Artificial Sequence: Synthetic oligonucleotide
ttattgagtaaatatattcctc

SEQ ID NO: 7488 - DNA, 22 bp, Artificial Sequence
  Description of Artificial Sequence: Synthetic oligonucleotide
atttataaatgtaaggtgccat

SEQ ID NO: 7489 - DNA, 22 bp, Artificial Sequence
  Description of Artificial Sequence: Synthetic oligonucleotide
tttccaaatccacatttggctc

SEQ ID NO: 7490 - DNA, 22 bp, Artificial Sequence
  Description of Artificial Sequence: Synthetic oligonucleotide
taatgctttggaattatagtac

SEQ ID NO: 7491 - DNA, 22 bp, Artificial Sequence
  Description of Artificial Sequence: Synthetic oligonucleotide
atttctaataactgtgtacctt

SEQ ID NO: 7492 - DNA, 22 bp, Artificial Sequence
  Description of Artificial Sequence: Synthetic oligonucleotide
ctatcttcagagtattccaggt

SEQ ID NO: 7493 - DNA, 22 bp, Artificial Sequence
  Description of Artificial Sequence: Synthetic oligonucleotide
tttggaaactgcttaatgccgc

SEQ ID NO: 7494 - DNA, 22 bp, Artificial Sequence
  Description of Artificial Sequence: Synthetic oligonucleotide
ttgtactaccatgaaatcagtt

SEQ ID NO: 7495 - DNA, 22 bp, Artificial Sequence
  Description of Artificial Sequence: Synthetic oligonucleotide
taaacctaccatttgagtgctc

SEQ ID NO: 7496 - DNA, 22 bp, Artificial Sequence
  Description of Artificial Sequence: Synthetic oligonucleotide
atactgaatgtagtcctgaggc

SEQ ID NO: 7497 - DNA, 22 bp, Artificial Sequence
  Description of Artificial Sequence: Synthetic oligonucleotide
ataatgcttggcgtagagaggc

SEQ ID NO: 7498 - DNA, 22 bp, Artificial Sequence
  Description of Artificial Sequence: Synthetic oligonucleotide
ttaacatgtaaactcacatgta

SEQ ID NO: 7499 - DNA, 22 bp, Artificial Sequence
  Description of Artificial Sequence: Synthetic oligonucleotide
tttctggagctaaatattctgg

SEQ ID NO: 7500 - DNA, 22 bp, Artificial Sequence
  Description of Artificial Sequence: Synthetic oligonucleotide
ttaatgagtctgataacatcat

SEQ ID NO: 7501 - DNA, 22 bp, Artificial Sequence
  Description of Artificial Sequence: Synthetic oligonucleotide
tactatttccagccagtttccc

SEQ ID NO: 7502 - DNA, 22 bp, Artificial Sequence
  Description of Artificial Sequence: Synthetic oligonucleotide
ttgattcttcagattgtgactc

SEQ ID NO: 7503 - DNA, 22 bp, Artificial Sequence
  Description of Artificial Sequence: Synthetic oligonucleotide
tatatacttcacagtctgaggc

SEQ ID NO: 7504 - DNA, 22 bp, Artificial Sequence
  Description of Artificial Sequence: Synthetic oligonucleotide
tatacttcacagtctgaggcct

SEQ ID NO: 7505 - DNA, 22 bp, Artificial Sequence
  Description of Artificial Sequence: Synthetic oligonucleotide
tattcccatcagtggcttggct

SEQ ID NO: 7506 - DNA, 22 bp, Artificial Sequence
  Description of Artificial Sequence: Synthetic oligonucleotide
ttaaatatacttatgaactcct

SEQ ID NO: 7507 - DNA, 22 bp, Artificial Sequence
  Description of Artificial Sequence: Synthetic oligonucleotide
attctccatcaccttctggcca

SEQ ID NO: 7508 - DNA, 22 bp, Artificial Sequence
  Description of Artificial Sequence: Synthetic oligonucleotide
ataagggaacagttagggatcc

SEQ ID NO: 7509 - DNA, 22 bp, Artificial Sequence
  Description of Artificial Sequence: Synthetic oligonucleotide
aatgacagggaccatcaggcga

SEQ ID NO: 7510 - DNA, 22 bp, Artificial Sequence
  Description of Artificial Sequence: Synthetic oligonucleotide
ttattgatctcaaacaccacgt

SEQ ID NO: 7511 - DNA, 22 bp, Artificial Sequence
  Description of Artificial Sequence: Synthetic oligonucleotide
taatccaatgaagtcatgggct

SEQ ID NO: 7512 - DNA, 22 bp, Artificial Sequence
  Description of Artificial Sequence: Synthetic oligonucleotide
ttatagatcagccctgggcggt

SEQ ID NO: 7513 - DNA, 22 bp, Artificial Sequence
  Description of Artificial Sequence: Synthetic oligonucleotide
ttcatagtagaggctctttgcg

SEQ ID NO: 7514 - DNA, 22 bp, Artificial Sequence
  Description of Artificial Sequence: Synthetic oligonucleotide
atttccaatacgttcctcagct

SEQ ID NO: 7515 - DNA, 22 bp, Artificial Sequence
  Description of Artificial Sequence: Synthetic oligonucleotide
tttgtttgtaatttatagccct

SEQ ID NO: 7516 - DNA, 22 bp, Artificial Sequence
  Description of Artificial Sequence: Synthetic oligonucleotide
attacttcttagggtctagcct

SEQ ID NO: 7517 - DNA, 22 bp, Artificial Sequence
  Description of Artificial Sequence: Synthetic oligonucleotide
ttactaattcaaagaacactac

SEQ ID NO: 7518 - DNA, 22 bp, Artificial Sequence
  Description of Artificial Sequence: Synthetic oligonucleotide
tttattagacacggccaggcag

SEQ ID NO: 7519 - DNA, 22 bp, Artificial Sequence
  Description of Artificial Sequence: Synthetic oligonucleotide
gaacgctttaccgcatagagcc

SEQ ID NO: 7520 - DNA, 22 bp, Artificial Sequence
  Description of Artificial Sequence: Synthetic oligonucleotide
cttaggtctcagtgtcactcgg

SEQ ID NO: 7521 - DNA, 22 bp, Artificial Sequence
  Description of Artificial Sequence: Synthetic oligonucleotide
tagaaagaggtcaaagtacctg

SEQ ID NO: 7522 - DNA, 22 bp, Artificial Sequence
  Description of Artificial Sequence: Synthetic oligonucleotide
gtatatgacctgaaactctggc

SEQ ID NO: 7523 - DNA, 22 bp, Artificial Sequence
  Description of Artificial Sequence: Synthetic oligonucleotide
tattagtgtgtattagtctcgt

SEQ ID NO: 7524 - DNA, 22 bp, Artificial Sequence
  Description of Artificial Sequence: Synthetic oligonucleotide
ataaggaaactgagtttgacgg

SEQ ID NO: 7525 - DNA, 22 bp, Artificial Sequence
  Description of Artificial Sequence: Synthetic oligonucleotide
attcaaatcaagatggtggcca

SEQ ID NO: 7526 - DNA, 22 bp, Artificial Sequence
  Description of Artificial Sequence: Synthetic oligonucleotide
taaacgattcaaatacttgggc

SEQ ID NO: 7527 - DNA, 22 bp, Artificial Sequence
  Description of Artificial Sequence: Synthetic oligonucleotide
atttattcagggtgtaatactg

SEQ ID NO: 7528 - DNA, 22 bp, Artificial Sequence
  Description of Artificial Sequence: Synthetic oligonucleotide
ttatatgagggagagatctgcc

SEQ ID NO: 7529 - DNA, 22 bp, Artificial Sequence
  Description of Artificial Sequence: Synthetic oligonucleotide
acatcctatgaagttgattggt

SEQ ID NO: 7530 - DNA, 22 bp, Artificial Sequence
  Description of Artificial Sequence: Synthetic oligonucleotide
tttccacttgataagaggtccc

SEQ ID NO: 7531 - DNA, 22 bp, Artificial Sequence
  Description of Artificial Sequence: Synthetic oligonucleotide
attcagtacaagacacattggt

SEQ ID NO: 7532 - DNA, 22 bp, Artificial Sequence
  Description of Artificial Sequence: Synthetic oligonucleotide
aaggcaaatgagatggtcaggt

SEQ ID NO: 7533 - DNA, 22 bp, Artificial Sequence
  Description of Artificial Sequence: Synthetic oligonucleotide
aataaacaacactacaaaggaa

SEQ ID NO: 7534 - DNA, 22 bp, Artificial Sequence
  Description of Artificial Sequence: Synthetic oligonucleotide
ttcttgtctgggaacagcactc

SEQ ID NO: 7535 - DNA, 22 bp, Artificial Sequence
  Description of Artificial Sequence: Synthetic oligonucleotide
ttgctatttgggctagtcaggt

SEQ ID NO: 7536 - DNA, 22 bp, Artificial Sequence
  Description of Artificial Sequence: Synthetic oligonucleotide
attatcaagaagaaggcgggaa

SEQ ID NO: 7537 - DNA, 22 bp, Artificial Sequence
  Description of Artificial Sequence: Synthetic oligonucleotide
atttggtttcagtttgagagct

SEQ ID NO: 7538 - DNA, 22 bp, Artificial Sequence
  Description of Artificial Sequence: Synthetic oligonucleotide
atacaagaactgtataaagcaa

SEQ ID NO: 7539 - DNA, 22 bp, Artificial Sequence
  Description of Artificial Sequence: Synthetic oligonucleotide
ttctgcacagagatgtagagct

SEQ ID NO: 7540 - DNA, 22 bp, Artificial Sequence
  Description of Artificial Sequence: Synthetic oligonucleotide
atagatgatctgttgtatccgc

SEQ ID NO: 7541 - DNA, 22 bp, Artificial Sequence
  Description of Artificial Sequence: Synthetic oligonucleotide
ttgaaggatgcatcagtaaccc

SEQ ID NO: 7542 - DNA, 22 bp, Artificial Sequence
  Description of Artificial Sequence: Synthetic oligonucleotide
tttgttcttcctgcttgaggct

SEQ ID NO: 7543 - DNA, 22 bp, Artificial Sequence
  Description of Artificial Sequence: Synthetic oligonucleotide
ttatgtcttgctgtattccgcc

SEQ ID NO: 7544 - DNA, 22 bp, Artificial Sequence
  Description of Artificial Sequence: Synthetic oligonucleotide
taagttgtggaagtgcctcggc

SEQ ID NO: 7545 - DNA, 22 bp, Artificial Sequence
  Description of Artificial Sequence: Synthetic oligonucleotide
tttatgtatggaggtgtctgtg

SEQ ID NO: 7546 - DNA, 22 bp, Artificial Sequence
  Description of Artificial Sequence: Synthetic oligonucleotide
taatcttcccagttaatggtca

SEQ ID NO: 7547 - DNA, 22 bp, Artificial Sequence
  Description of Artificial Sequence: Synthetic oligonucleotide
cattgtcatcaagccaaagtct

SEQ ID NO: 7548 - DNA, 22 bp, Artificial Sequence
  Description of Artificial Sequence: Synthetic oligonucleotide
atatttagagggagatcctccg

SEQ ID NO: 7549 - DNA, 22 bp, Artificial Sequence
  Description of Artificial Sequence: Synthetic oligonucleotide
atttccttccatgtacccagca

SEQ ID NO: 7550 - DNA, 22 bp, Artificial Sequence
  Description of Artificial Sequence: Synthetic oligonucleotide
tttagtgagcagtataagtgcg

SEQ ID NO: 7551 - DNA, 22 bp, Artificial Sequence
  Description of Artificial Sequence: Synthetic oligonucleotide
ttagagaattaggatgaactag

SEQ ID NO: 7552 - DNA, 22 bp, Artificial Sequence
  Description of Artificial Sequence: Synthetic oligonucleotide
tgataattccaccttctatctc

SEQ ID NO: 7553 - DNA, 22 bp, Artificial Sequence
  Description of Artificial Sequence: Synthetic oligonucleotide
atgaaatattgaagtatctggt

SEQ ID NO: 7554 - DNA, 22 bp, Artificial Sequence
  Description of Artificial Sequence: Synthetic oligonucleotide
tataactagcattgatgtagtc

SEQ ID NO: 7555 - DNA, 22 bp, Artificial Sequence
  Description of Artificial Sequence: Synthetic oligonucleotide
aattcccgtacgagtttgggcc

SEQ ID NO: 7556 - DNA, 22 bp, Artificial Sequence
  Description of Artificial Sequence: Synthetic oligonucleotide
ttcctggaatagtctcggtgca

SEQ ID NO: 7557 - DNA, 22 bp, Artificial Sequence
  Description of Artificial Sequence: Synthetic oligonucleotide
ttattcatgtacttcattgcgt

SEQ ID NO: 7558 - DNA, 22 bp, Artificial Sequence
  Description of Artificial Sequence: Synthetic oligonucleotide
atttcaaagtggtcaaagttga

SEQ ID NO: 7559 - DNA, 22 bp, Artificial Sequence
  Description of Artificial Sequence: Synthetic oligonucleotide
gaataccacaaattaaccagga

SEQ ID NO: 7560 - DNA, 22 bp, Artificial Sequence
  Description of Artificial Sequence: Synthetic oligonucleotide
tttcttgaagtgttggctccca

SEQ ID NO: 7561 - DNA, 22 bp, Artificial Sequence
  Description of Artificial Sequence: Synthetic oligonucleotide
tttgagaatgaatatgcgaccc

SEQ ID NO: 7562 - DNA, 22 bp, Artificial Sequence
  Description of Artificial Sequence: Synthetic oligonucleotide
ttcaatgataagtgcatcagga

SEQ ID NO: 7563 - DNA, 22 bp, Artificial Sequence
  Description of Artificial Sequence: Synthetic oligonucleotide
ttaatatgtaatggaagctctg

SEQ ID NO: 7564 - DNA, 22 bp, Artificial Sequence
  Description of Artificial Sequence: Synthetic oligonucleotide
attacagtgaacaagctgacct

SEQ ID NO: 7565 - DNA, 22 bp, Artificial Sequence
  Description of Artificial Sequence: Synthetic oligonucleotide
aatggagaggtaaacatgaccg

SEQ ID NO: 7566 - DNA, 22 bp, Artificial Sequence
  Description of Artificial Sequence: Synthetic oligonucleotide
atttccataaacactattccaa

SEQ ID NO: 7567 - DNA, 22 bp, Artificial Sequence
  Description of Artificial Sequence: Synthetic oligonucleotide
ataattcaacagatgcattctc

SEQ ID NO: 7568 - DNA, 22 bp, Artificial Sequence
  Description of Artificial Sequence: Synthetic oligonucleotide
taattcgcagataaatggtctt

SEQ ID NO: 7569 - DNA, 22 bp, Artificial Sequence
  Description of Artificial Sequence: Synthetic oligonucleotide
gttcctgtgtatataaactcca

SEQ ID NO: 7570 - DNA, 22 bp, Artificial Sequence
  Description of Artificial Sequence: Synthetic oligonucleotide
tttgcttaaattatgagggcag

SEQ ID NO: 7571 - DNA, 22 bp, Artificial Sequence
  Description of Artificial Sequence: Synthetic oligonucleotide
taaccttattgcattaagggca

SEQ ID NO: 7572 - DNA, 22 bp, Artificial Sequence
  Description of Artificial Sequence: Synthetic oligonucleotide
ttatttcatctcgtgcaaagcc

SEQ ID NO: 7573 - DNA, 22 bp, Artificial Sequence
  Description of Artificial Sequence: Synthetic oligonucleotide
taatgtatagagaatgacgccc

SEQ ID NO: 7574 - DNA, 22 bp, Artificial Sequence
  Description of Artificial Sequence: Synthetic oligonucleotide
taataggatgaccagaagtgga

SEQ ID NO: 7575 - DNA, 22 bp, Artificial Sequence
  Description of Artificial Sequence: Synthetic oligonucleotide
ttacagcataagctcatttgct

SEQ ID NO: 7576 - DNA, 22 bp, Artificial Sequence
  Description of Artificial Sequence: Synthetic oligonucleotide
taatggcatctcttggatgcct

SEQ ID NO: 7577 - DNA, 22 bp, Artificial Sequence
  Description of Artificial Sequence: Synthetic oligonucleotide
tttagtaatgttctcatcactt

SEQ ID NO: 7578 - DNA, 22 bp, Artificial Sequence
  Description of Artificial Sequence: Synthetic oligonucleotide
tagtccattggcagggactgtc

SEQ ID NO: 7579 - DNA, 22 bp, Artificial Sequence
  Description of Artificial Sequence: Synthetic oligonucleotide
ttaagaagtgatccaatcccag

SEQ ID NO: 7580 - DNA, 22 bp, Artificial Sequence
  Description of Artificial Sequence: Synthetic oligonucleotide
tataccacagagattcccgtag

SEQ ID NO: 7581 - DNA, 22 bp, Artificial Sequence
  Description of Artificial Sequence: Synthetic oligonucleotide
atccatttcagcataaactctc

SEQ ID NO: 7582 - DNA, 22 bp, Artificial Sequence
  Description of Artificial Sequence: Synthetic oligonucleotide
ttcattgaaagactaataacca

SEQ ID NO: 7583 - DNA, 22 bp, Artificial Sequence
  Description of Artificial Sequence: Synthetic oligonucleotide
atagtgaatgtgatacatgtat

SEQ ID NO: 7584 - DNA, 22 bp, Artificial Sequence
  Description of Artificial Sequence: Synthetic oligonucleotide
tattctacatagataaggtgtg

SEQ ID NO: 7585 - DNA, 22 bp, Artificial Sequence
  Description of Artificial Sequence: Synthetic oligonucleotide
ttctatataaactagcagtcag

SEQ ID NO: 7586 - DNA, 22 bp, Artificial Sequence
  Description of Artificial Sequence: Synthetic oligonucleotide
taggaagataagatattagccc

SEQ ID NO: 7587 - DNA, 22 bp, Artificial Sequence
  Description of Artificial Sequence: Synthetic oligonucleotide
ttaatgcagtaacctcaggctt

SEQ ID NO: 7588 - DNA, 22 bp, Artificial Sequence
  Description of Artificial Sequence: Synthetic oligonucleotide
taaatctcttctttactcaggc

SEQ ID NO: 7589 - DNA, 22 bp, Artificial Sequence
  Description of Artificial Sequence: Synthetic oligonucleotide
taagagtatcagctaaagtcat

SEQ ID NO: 7590 - DNA, 22 bp, Artificial Sequence
  Description of Artificial Sequence: Synthetic oligonucleotide
aatatgatgctaataaatggcc

SEQ ID NO: 7591 - DNA, 22 bp, Artificial Sequence
  Description of Artificial Sequence: Synthetic oligonucleotide
cattggtatcgtaagaagccgt

SEQ ID NO: 7592 - DNA, 22 bp, Artificial Sequence
  Description of Artificial Sequence: Synthetic oligonucleotide
atgctatttcaatgcaagacca

SEQ ID NO: 7593 - DNA, 22 bp, Artificial Sequence
  Description of Artificial Sequence: Synthetic oligonucleotide
attggagatgagtagaactggt

SEQ ID NO: 7594 - DNA, 22 bp, Artificial Sequence
  Description of Artificial Sequence: Synthetic oligonucleotide
ttgttggaagcccttcttcggc

SEQ ID NO: 7595 - DNA, 22 bp, Artificial Sequence
  Description of Artificial Sequence: Synthetic oligonucleotide
ttatctgcacacagccttggcc

SEQ ID NO: 7596 - DNA, 22 bp, Artificial Sequence
  Description of Artificial Sequence: Synthetic oligonucleotide
tttaattcctgcttaaaggcca

SEQ ID NO: 7597 - DNA, 22 bp, Artificial Sequence
  Description of Artificial Sequence: Synthetic oligonucleotide
ttgctctataatttaccaattg

SEQ ID NO: 7598 - DNA, 22 bp, Artificial Sequence
  Description of Artificial Sequence: Synthetic oligonucleotide
attcaagatgacctcgggagcc

SEQ ID NO: 7599 - DNA, 22 bp, Artificial Sequence
  Description of Artificial Sequence: Synthetic oligonucleotide
aagtccgtgaagtcatccaggg

SEQ ID NO: 7600 - DNA, 22 bp, Artificial Sequence
  Description of Artificial Sequence: Synthetic oligonucleotide
atccaattcaagatgacctcgg

SEQ ID NO: 7601 - DNA, 22 bp, Artificial Sequence
  Description of Artificial Sequence: Synthetic oligonucleotide
tttatcagggagtacttgtggt

SEQ ID NO: 7602 - DNA, 22 bp, Artificial Sequence
  Description of Artificial Sequence: Synthetic oligonucleotide
tgactttattattctgcaggta

SEQ ID NO: 7603 - DNA, 22 bp, Artificial Sequence
  Description of Artificial Sequence: Synthetic oligonucleotide
ttacatttgctaagtgtcctga

SEQ ID NO: 7604 - DNA, 22 bp, Artificial Sequence
  Description of Artificial Sequence: Synthetic oligonucleotide
aatgtaaacatcatggtttcca

SEQ ID NO: 7605 - DNA, 22 bp, Artificial Sequence
  Description of Artificial Sequence: Synthetic oligonucleotide
tttagttctgacttgttgagct

SEQ ID NO: 7606 - DNA, 22 bp, Artificial Sequence
  Description of Artificial Sequence: Synthetic oligonucleotide
ttattgttcctgggtctctgga

SEQ ID NO: 7607 - DNA, 22 bp, Artificial Sequence
  Description of Artificial Sequence: Synthetic oligonucleotide
caatcttgtcatcacgtctggt

SEQ ID NO: 7608 - DNA, 22 bp, Artificial Sequence
  Description of Artificial Sequence: Synthetic oligonucleotide
gtagtctgtggctatgtctccc

SEQ ID NO: 7609 - DNA, 22 bp, Artificial Sequence
  Description of Artificial Sequence: Synthetic oligonucleotide
ttattctgcaggtacatgtcca

SEQ ID NO: 7610 - DNA, 22 bp, Artificial Sequence
  Description of Artificial Sequence: Synthetic oligonucleotide
ttctgcaggtacatgtccaggg

SEQ ID NO: 7611 - DNA, 22 bp, Artificial Sequence
  Description of Artificial Sequence: Synthetic oligonucleotide
atctactttgccagtacaggaa

SEQ ID NO: 7612 - DNA, 22 bp, Artificial Sequence
  Description of Artificial Sequence: Synthetic oligonucleotide
tattgctatatccttcaccttg

SEQ ID NO: 7613 - DNA, 22 bp, Artificial Sequence
  Description of Artificial Sequence: Synthetic oligonucleotide
ttctggaattgtattatctcct

SEQ ID NO: 7614 - DNA, 22 bp, Artificial Sequence
  Description of Artificial Sequence: Synthetic oligonucleotide
ataaagttctgcatcaagaccg

SEQ ID NO: 7615 - DNA, 22 bp, Artificial Sequence
  Description of Artificial Sequence: Synthetic oligonucleotide
acaaagcatccctgacaggctt

SEQ ID NO: 7616 - DNA, 22 bp, Artificial Sequence
  Description of Artificial Sequence: Synthetic oligonucleotide
tgatctcacgacggtatagctt

SEQ ID NO: 7617 - DNA, 22 bp, Artificial Sequence
  Description of Artificial Sequence: Synthetic oligonucleotide
ttaaattaagtcagcaaagtca

SEQ ID NO: 7618 - DNA, 22 bp, Artificial Sequence
  Description of Artificial Sequence: Synthetic oligonucleotide
tttagggttgacgtctaagctc

SEQ ID NO: 7619 - DNA, 22 bp, Artificial Sequence
  Description of Artificial Sequence: Synthetic oligonucleotide
taaattccacagatcatcagga

SEQ ID NO: 7620 - DNA, 22 bp, Artificial Sequence
  Description of Artificial Sequence: Synthetic oligonucleotide
taatggtttactccaaagccca

SEQ ID NO: 7621 - DNA, 22 bp, Artificial Sequence
  Description of Artificial Sequence: Synthetic oligonucleotide
tttctgaataactgaagttggt

SEQ ID NO: 7622 - DNA, 22 bp, Artificial Sequence
  Description of Artificial Sequence: Synthetic oligonucleotide
atatcccatctcattatcagct

SEQ ID NO: 7623 - DNA, 22 bp, Artificial Sequence
  Description of Artificial Sequence: Synthetic oligonucleotide
tagacaactgatataaccacgt

SEQ ID NO: 7624 - DNA, 22 bp, Artificial Sequence
  Description of Artificial Sequence: Synthetic oligonucleotide
tttcttgatcacagggactcga

SEQ ID NO: 7625 - DNA, 22 bp, Artificial Sequence
  Description of Artificial Sequence: Synthetic oligonucleotide
atacactgttaacgtagggccc

SEQ ID NO: 7626 - DNA, 22 bp, Artificial Sequence
  Description of Artificial Sequence: Synthetic oligonucleotide
tatagatgggacgttgcagggc

SEQ ID NO: 7627 - DNA, 22 bp, Artificial Sequence
  Description of Artificial Sequence: Synthetic oligonucleotide
atagtcaacaggattctttcct

SEQ ID NO: 7628 - DNA, 22 bp, Artificial Sequence
  Description of Artificial Sequence: Synthetic oligonucleotide
atttgtgagaagtctccttgcc

SEQ ID NO: 7629 - DNA, 22 bp, Artificial Sequence
  Description of Artificial Sequence: Synthetic oligonucleotide
atattctctctcaataagtcct

SEQ ID NO: 7630 - DNA, 22 bp, Artificial Sequence
  Description of Artificial Sequence: Synthetic oligonucleotide
tttcattatccgcactatagca

SEQ ID NO: 7631 - DNA, 22 bp, Artificial Sequence
  Description of Artificial Sequence: Synthetic oligonucleotide
taattcaaacatctgtacactt

SEQ ID NO: 7632 - DNA, 22 bp, Artificial Sequence
  Description of Artificial Sequence: Synthetic oligonucleotide
tttacaactgacgtaagggcct

SEQ ID NO: 7633 - DNA, 22 bp, Artificial Sequence
  Description of Artificial Sequence: Synthetic oligonucleotide
ttgaataagggcattgtgccga

SEQ ID NO: 7634 - DNA, 22 bp, Artificial Sequence
  Description of Artificial Sequence: Synthetic oligonucleotide
tgaacaaaggagttaataaccc

SEQ ID NO: 7635 - DNA, 22 bp, Artificial Sequence
  Description of Artificial Sequence: Synthetic oligonucleotide
tagatcttagagatcagggcat

SEQ ID NO: 7636 - DNA, 22 bp, Artificial Sequence
  Description of Artificial Sequence: Synthetic oligonucleotide
ttgtgtcctcttattggctggc

SEQ ID NO: 7637 - DNA, 22 bp, Artificial Sequence
  Description of Artificial Sequence: Synthetic oligonucleotide
attacaaatgaacttgtcacca

SEQ ID NO: 7638 - DNA, 22 bp, Artificial Sequence
  Description of Artificial Sequence: Synthetic oligonucleotide
tatctctttccatgtagtcccg

SEQ ID NO: 7639 - DNA, 22 bp, Artificial Sequence
  Description of Artificial Sequence: Synthetic oligonucleotide
ttaacacacagtgtcctatggt

SEQ ID NO: 7640 - DNA, 22 bp, Artificial Sequence
  Description of Artificial Sequence: Synthetic oligonucleotide
aacatgatgtagatattcagga

SEQ ID NO: 7641 - DNA, 22 bp, Artificial Sequence
  Description of Artificial Sequence: Synthetic oligonucleotide
attctgaatagcttccactgct

SEQ ID NO: 7642 - DNA, 22 bp, Artificial Sequence
  Description of Artificial Sequence: Synthetic oligonucleotide
tacatggttaagatattctgga

SEQ ID NO: 7643 - DNA, 22 bp, Artificial Sequence
  Description of Artificial Sequence: Synthetic oligonucleotide
tttattctaaacaacttgtgct

SEQ ID NO: 7644 - DNA, 22 bp, Artificial Sequence
  Description of Artificial Sequence: Synthetic oligonucleotide
tatctcctcaaagctgaagcca

SEQ ID NO: 7645 - DNA, 22 bp, Artificial Sequence
  Description of Artificial Sequence: Synthetic oligonucleotide
atttaagactggaataacagat

SEQ ID NO: 7646 - DNA, 22 bp, Artificial Sequence
  Description of Artificial Sequence: Synthetic oligonucleotide
atggtcatcaccagacagaggt

SEQ ID NO: 7647 - DNA, 22 bp, Artificial Sequence
  Description of Artificial Sequence: Synthetic oligonucleotide
ttctcataggcagtgaggtggt

SEQ ID NO: 7648 - DNA, 22 bp, Artificial Sequence
  Description of Artificial Sequence: Synthetic oligonucleotide
tacacatatgcatctctgggca

SEQ ID NO: 7649 - DNA, 22 bp, Artificial Sequence
  Description of Artificial Sequence: Synthetic oligonucleotide
tatacacatatgcatctctggg

SEQ ID NO: 7650 - DNA, 22 bp, Artificial Sequence
  Description of Artificial Sequence: Synthetic oligonucleotide
ttattaaagaacttaaccggaa

SEQ ID NO: 7651 - DNA, 22 bp, Artificial Sequence
  Description of Artificial Sequence: Synthetic oligonucleotide
atctctgtgcatatataagctt

SEQ ID NO: 7652 - DNA, 22 bp, Artificial Sequence
  Description of Artificial Sequence: Synthetic oligonucleotide
ttctgtattaacagtctgggat

SEQ ID NO: 7653 - DNA, 22 bp, Artificial Sequence
  Description of Artificial Sequence: Synthetic oligonucleotide
atcaataatcagtccaagttct

SEQ ID NO: 7654 - DNA, 22 bp, Artificial Sequence
  Description of Artificial Sequence: Synthetic oligonucleotide
atttctgtacataaacacacgc

SEQ ID NO: 7655 - DNA, 22 bp, Artificial Sequence
  Description of Artificial Sequence: Synthetic oligonucleotide
taattcaattgcatcatctggc

SEQ ID NO: 7656 - DNA, 22 bp, Artificial Sequence
  Description of Artificial Sequence: Synthetic oligonucleotide
attcaattgcatcatctggcct

SEQ ID NO: 7657 - DNA, 22 bp, Artificial Sequence
  Description of Artificial Sequence: Synthetic oligonucleotide
taaatgcttcatgctgactgct

SEQ ID NO: 7658 - DNA, 22 bp, Artificial Sequence
  Description of Artificial Sequence: Synthetic oligonucleotide
ctatttcatccttagatcctcc

SEQ ID NO: 7659 - DNA, 22 bp, Artificial Sequence
  Description of Artificial Sequence: Synthetic oligonucleotide
atataatccaggaccagcatct

SEQ ID NO: 7660 - DNA, 22 bp, Artificial Sequence
  Description of Artificial Sequence: Synthetic oligonucleotide
attggttagctgactcaaaggt

SEQ ID NO: 7661 - DNA, 22 bp, Artificial Sequence
  Description of Artificial Sequence: Synthetic oligonucleotide
atttctcttaatatagtagcga

SEQ ID NO: 7662 - DNA, 22 bp, Artificial Sequence
  Description of Artificial Sequence: Synthetic oligonucleotide
ataaacactgagagaaaggcct

SEQ ID NO: 7663 - DNA, 22 bp, Artificial Sequence
  Description of Artificial Sequence: Synthetic oligonucleotide
taatatagtagcgatctgggtt

SEQ ID NO: 7664 - DNA, 22 bp, Artificial Sequence
  Description of Artificial Sequence: Synthetic oligonucleotide
cttctctgcaagtctatgagcc

SEQ ID NO: 7665 - DNA, 22 bp, Artificial Sequence
  Description of Artificial Sequence: Synthetic oligonucleotide
gtagaattgcagcacaagatca

SEQ ID NO: 7666 - DNA, 22 bp, Artificial Sequence
  Description of Artificial Sequence: Synthetic oligonucleotide
gatttctacaagacttctctgc

SEQ ID NO: 7667 - DNA, 22 bp, Artificial Sequence
  Description of Artificial Sequence: Synthetic oligonucleotide
taactcaagaactcttaatcgg

SEQ ID NO: 7668 - DNA, 22 bp, Artificial Sequence
  Description of Artificial Sequence: Synthetic oligonucleotide
tattcgactgacatagttacag

SEQ ID NO: 7669 - DNA, 22 bp, Artificial Sequence
  Description of Artificial Sequence: Synthetic oligonucleotide
tattaaatccttgaccacagct

SEQ ID NO: 7670 - DNA, 22 bp, Artificial Sequence
  Description of Artificial Sequence: Synthetic oligonucleotide
aactcatcgaagtccatgcggt

SEQ ID NO: 7671 - DNA, 22 bp, Artificial Sequence
  Description of Artificial Sequence: Synthetic oligonucleotide
atatcatataactgataccttc

SEQ ID NO: 7672 - DNA, 22 bp, Artificial Sequence
  Description of Artificial Sequence: Synthetic oligonucleotide
atcgcatttgaaattcagtctt

SEQ ID NO: 7673 - DNA, 22 bp, Artificial Sequence
  Description of Artificial Sequence: Synthetic oligonucleotide
atagagaatggcagtttgggtg

SEQ ID NO: 7674 - DNA, 22 bp, Artificial Sequence
  Description of Artificial Sequence: Synthetic oligonucleotide
ttctcatatctctctgtctgat

SEQ ID NO: 7675 - DNA, 22 bp, Artificial Sequence
  Description of Artificial Sequence: Synthetic oligonucleotide
ttatacaagttcccactggcct

SEQ ID NO: 7676 - DNA, 22 bp, Artificial Sequence
  Description of Artificial Sequence: Synthetic oligonucleotide
ctgattgatgaaacacatgggc

SEQ ID NO: 7677 - DNA, 22 bp, Artificial Sequence
  Description of Artificial Sequence: Synthetic oligonucleotide
atacaagttcccactggccttg

SEQ ID NO: 7678 - DNA, 22 bp, Artificial Sequence
  Description of Artificial Sequence: Synthetic oligonucleotide
tagttaaagcacagaaagccgg

SEQ ID NO: 7679 - DNA, 22 bp, Artificial Sequence
  Description of Artificial Sequence: Synthetic oligonucleotide
atacaatataacgcaaagggca

SEQ ID NO: 7680 - DNA, 22 bp, Artificial Sequence
  Description of Artificial Sequence: Synthetic oligonucleotide
ttgttaatgcacttgacggcga

SEQ ID NO: 7681 - DNA, 22 bp, Artificial Sequence
  Description of Artificial Sequence: Synthetic oligonucleotide
atatctcatcatttaagatggc

SEQ ID NO: 7682 - DNA, 22 bp, Artificial Sequence
  Description of Artificial Sequence: Synthetic oligonucleotide
tttatctattatgcaattgctt

SEQ ID NO: 7683 - DNA, 22 bp, Artificial Sequence
  Description of Artificial Sequence: Synthetic oligonucleotide
ttaatacaaatcagaatcccac

SEQ ID NO: 7684 - DNA, 22 bp, Artificial Sequence
  Description of Artificial Sequence: Synthetic oligonucleotide
tttagctagcacagtcaaactg

SEQ ID NO: 7685 - DNA, 22 bp, Artificial Sequence
  Description of Artificial Sequence: Synthetic oligonucleotide
ttagaacctccttctaactgga

SEQ ID NO: 7686 - DNA, 22 bp, Artificial Sequence
  Description of Artificial Sequence: Synthetic oligonucleotide
atagttgatgaaatccactgcc

SEQ ID NO: 7687 - DNA, 22 bp, Artificial Sequence
  Description of Artificial Sequence: Synthetic oligonucleotide
taaagtgaaggcagacctagta

SEQ ID NO: 7688 - DNA, 22 bp, Artificial Sequence
  Description of Artificial Sequence: Synthetic oligonucleotide
taaattcatgtaatagcctggc

SEQ ID NO: 7689 - DNA, 22 bp, Artificial Sequence
  Description of Artificial Sequence: Synthetic oligonucleotide
atgctaatggagcgtatgtctt

SEQ ID NO: 7690 - DNA, 22 bp, Artificial Sequence
  Description of Artificial Sequence: Synthetic oligonucleotide
cttgcgatgcacagtgagccga

SEQ ID NO: 7691 - DNA, 22 bp, Artificial Sequence
  Description of Artificial Sequence: Synthetic oligonucleotide
ttaaacttaaagcggctgggca

SEQ ID NO: 7692 - DNA, 22 bp, Artificial Sequence
  Description of Artificial Sequence: Synthetic oligonucleotide
tgaagagatgattgtccacctt

SEQ ID NO: 7693 - DNA, 22 bp, Artificial Sequence
  Description of Artificial Sequence: Synthetic oligonucleotide
taagatgttgtgcatctccgcc

SEQ ID NO: 7694 - DNA, 22 bp, Artificial Sequence
  Description of Artificial Sequence: Synthetic oligonucleotide
aataatgaactcatcgtcgctg

SEQ ID NO: 7695 - DNA, 22 bp, Artificial Sequence
  Description of Artificial Sequence: Synthetic oligonucleotide
tgtagttagcatttgcaaagtc

SEQ ID NO: 7696 - DNA, 22 bp, Artificial Sequence
  Description of Artificial Sequence: Synthetic oligonucleotide
tagcatttgcaaagtctctcca

SEQ ID NO: 7697 - DNA, 22 bp, Artificial Sequence
  Description of Artificial Sequence: Synthetic oligonucleotide
ataagagatggctttatgtcta

SEQ ID NO: 7698 - DNA, 22 bp, Artificial Sequence
  Description of Artificial Sequence: Synthetic oligonucleotide
gtcattactcccatgaagtgca

SEQ ID NO: 7699 - DNA, 22 bp, Artificial Sequence
  Description of Artificial Sequence: Synthetic oligonucleotide
ttggatggtgacaaagtttggg

SEQ ID NO: 7700 - DNA, 22 bp, Artificial Sequence
  Description of Artificial Sequence: Synthetic oligonucleotide
tttgcttacaaagctctgtgag

SEQ ID NO: 7701 - DNA, 22 bp, Artificial Sequence
  Description of Artificial Sequence: Synthetic oligonucleotide
ttaagatacgagtttatgtgcc

SEQ ID NO: 7702 - DNA, 22 bp, Artificial Sequence
  Description of Artificial Sequence: Synthetic oligonucleotide
gttcggaaacaagttatgaggg

SEQ ID NO: 7703 - DNA, 22 bp, Artificial Sequence
  Description of Artificial Sequence: Synthetic oligonucleotide
tgtagtaacaacattcagtggg

SEQ ID NO: 7704 - DNA, 22 bp, Artificial Sequence
  Description of Artificial Sequence: Synthetic oligonucleotide
ttgtaatagcagcatatgacag

SEQ ID NO: 7705 - DNA, 22 bp, Artificial Sequence
  Description of Artificial Sequence: Synthetic oligonucleotide
ttatcaaatcgaatacaacgca

SEQ ID NO: 7706 - DNA, 22 bp, Artificial Sequence
  Description of Artificial Sequence: Synthetic oligonucleotide
taatcttaaggcatccagggtg

SEQ ID NO: 7707 - DNA, 22 bp, Artificial Sequence
  Description of Artificial Sequence: Synthetic oligonucleotide
tattgcagtcagacaggttgat

SEQ ID NO: 7708 - DNA, 22 bp, Artificial Sequence
  Description of Artificial Sequence: Synthetic oligonucleotide
tcttggtatcacagtagtactt

SEQ ID NO: 7709 - DNA, 22 bp, Artificial Sequence
  Description of Artificial Sequence: Synthetic oligonucleotide
cttcctaatcagatacagctga

SEQ ID NO: 7710 - DNA, 22 bp, Artificial Sequence
  Description of Artificial Sequence: Synthetic oligonucleotide
attcaaacaccaggtgaagcct

SEQ ID NO: 7711 - DNA, 22 bp, Artificial Sequence
  Description of Artificial Sequence: Synthetic oligonucleotide
ttatgtaagttcatgagggccc

SEQ ID NO: 7712 - DNA, 22 bp, Artificial Sequence
  Description of Artificial Sequence: Synthetic oligonucleotide
acatatgagcatgtgaatggaa

SEQ ID NO: 7713 - DNA, 22 bp, Artificial Sequence
  Description of Artificial Sequence: Synthetic oligonucleotide
ttattatgtaagttcatgaggg

SEQ ID NO: 7714 - DNA, 22 bp, Artificial Sequence
  Description of Artificial Sequence: Synthetic oligonucleotide
tttcatagggataaacaatgcg

SEQ ID NO: 7715 - DNA, 22 bp, Artificial Sequence
  Description of Artificial Sequence: Synthetic oligonucleotide
atatgactcaataaactgggca

SEQ ID NO: 7716 - DNA, 22 bp, Artificial Sequence
  Description of Artificial Sequence: Synthetic oligonucleotide
ttcatctggtccagaaaggccc

SEQ ID NO: 7717 - DNA, 22 bp, Artificial Sequence
  Description of Artificial Sequence: Synthetic oligonucleotide
cttcttgagcaggttcttgggc

SEQ ID NO: 7718 - DNA, 22 bp, Artificial Sequence
  Description of Artificial Sequence: Synthetic oligonucleotide
tttcatgttgaagggaagaggg

SEQ ID NO: 7719 - DNA, 22 bp, Artificial Sequence
  Description of Artificial Sequence: Synthetic oligonucleotide
tcctcaaatcccagtttgtctt

SEQ ID NO: 7720 - DNA, 22 bp, Artificial Sequence
  Description of Artificial Sequence: Synthetic oligonucleotide
tttcctgaagttctcatgctgg

SEQ ID NO: 7721 - DNA, 22 bp, Artificial Sequence
  Description of Artificial Sequence: Synthetic oligonucleotide
ttcatggagtccttggtgaggc

SEQ ID NO: 7722 - DNA, 22 bp, Artificial Sequence
  Description of Artificial Sequence: Synthetic oligonucleotide
agttggtatcatggaggctggc

SEQ ID NO: 7723 - DNA, 22 bp, Artificial Sequence
  Description of Artificial Sequence: Synthetic oligonucleotide
taaagagaggtgcagaggacgc

SEQ ID NO: 7724 - DNA, 22 bp, Artificial Sequence
  Description of Artificial Sequence: Synthetic oligonucleotide
tttcctattgcagttctcagtc

SEQ ID NO: 7725 - DNA, 22 bp, Artificial Sequence
  Description of Artificial Sequence: Synthetic oligonucleotide
ttaacaattcacatagtcgctg

SEQ ID NO: 7726 - DNA, 22 bp, Artificial Sequence
  Description of Artificial Sequence: Synthetic oligonucleotide
ttcagatgtcgaagagtcactg

SEQ ID NO: 7727 - DNA, 22 bp, Artificial Sequence
  Description of Artificial Sequence: Synthetic oligonucleotide
taactgaagaaatttcgctgga

SEQ ID NO: 7728 - DNA, 22 bp, Artificial Sequence
  Description of Artificial Sequence: Synthetic oligonucleotide
atttctgatgcctcttggacct

SEQ ID NO: 7729 - DNA, 22 bp, Artificial Sequence
  Description of Artificial Sequence: Synthetic oligonucleotide
tttatgatgggaactatgacaa

SEQ ID NO: 7730 - DNA, 22 bp, Artificial Sequence
  Description of Artificial Sequence: Synthetic oligonucleotide
attcattccaagatagagacca

SEQ ID NO: 7731 - DNA, 22 bp, Artificial Sequence
  Description of Artificial Sequence: Synthetic oligonucleotide
ataaatagtgacacaaggtcaa

SEQ ID NO: 7732 - DNA, 22 bp, Artificial Sequence
  Description of Artificial Sequence: Synthetic oligonucleotide
tttacataacctgttctgagtt

SEQ ID NO: 7733 - DNA, 22 bp, Artificial Sequence
  Description of Artificial Sequence: Synthetic oligonucleotide
ttaactgtgaactatatctctg

SEQ ID NO: 7734 - DNA, 22 bp, Artificial Sequence
  Description of Artificial Sequence: Synthetic oligonucleotide
ttagtataggcaattatctctg

SEQ ID NO: 7735 - DNA, 22 bp, Artificial Sequence
  Description of Artificial Sequence: Synthetic oligonucleotide
ttaacagctcataatgtttggt

SEQ ID NO: 7736 - DNA, 22 bp, Artificial Sequence
  Description of Artificial Sequence: Synthetic oligonucleotide
attatcactgtcctgttctgct

SEQ ID NO: 7737 - DNA, 22 bp, Artificial Sequence
  Description of Artificial Sequence: Synthetic oligonucleotide
tttccacagaaggtgctcctgc

SEQ ID NO: 7738 - DNA, 22 bp, Artificial Sequence
  Description of Artificial Sequence: Synthetic oligonucleotide
tttagttctgtgtttggccgga

SEQ ID NO: 7739 - DNA, 22 bp, Artificial Sequence
  Description of Artificial Sequence: Synthetic oligonucleotide
attcttagaggcatagtcagcc

SEQ ID NO: 7740 - DNA, 22 bp, Artificial Sequence
  Description of Artificial Sequence: Synthetic oligonucleotide
ttaccatctgatcatgcaacct

SEQ ID NO: 7741 - DNA, 22 bp, Artificial Sequence
  Description of Artificial Sequence: Synthetic oligonucleotide
gtttcttagcagcagcagggct

SEQ ID NO: 7742 - DNA, 22 bp, Artificial Sequence
  Description of Artificial Sequence: Synthetic oligonucleotide
atagaagtgggaagaaccattg

SEQ ID NO: 7743 - DNA, 22 bp, Artificial Sequence
  Description of Artificial Sequence: Synthetic oligonucleotide
tttccttatgacactttgccag

SEQ ID NO: 7744 - DNA, 22 bp, Artificial Sequence
  Description of Artificial Sequence: Synthetic oligonucleotide
atttcgaatgctcaggtcagca

SEQ ID NO: 7745 - DNA, 22 bp, Artificial Sequence
  Description of Artificial Sequence: Synthetic oligonucleotide
ataatgaaaggcactcttcgtt

SEQ ID NO: 7746 - DNA, 22 bp, Artificial Sequence
  Description of Artificial Sequence: Synthetic oligonucleotide
attgacattggtattatccttg

SEQ ID NO: 7747 - DNA, 22 bp, Artificial Sequence
  Description of Artificial Sequence: Synthetic oligonucleotide
taatactggaatattcccactt

SEQ ID NO: 7748 - DNA, 22 bp, Artificial Sequence
  Description of Artificial Sequence: Synthetic oligonucleotide
ttagtatctaagctgctgggct

SEQ ID NO: 7749 - DNA, 22 bp, Artificial Sequence
  Description of Artificial Sequence: Synthetic oligonucleotide
ttactttagtatctaagctgct

SEQ ID NO: 7750 - DNA, 22 bp, Artificial Sequence
  Description of Artificial Sequence: Synthetic oligonucleotide
ctttacaaacagtttccattcc

SEQ ID NO: 7751 - DNA, 22 bp, Artificial Sequence
  Description of Artificial Sequence: Synthetic oligonucleotide
taaacagacattattgtgtgtt

SEQ ID NO: 7752 - DNA, 22 bp, Artificial Sequence
  Description of Artificial Sequence: Synthetic oligonucleotide
ttactgtagaagtagatgccag

SEQ ID NO: 7753 - DNA, 22 bp, Artificial Sequence
  Description of Artificial Sequence: Synthetic oligonucleotide
gatgagcagcatctggcgcggc

SEQ ID NO: 7754 - DNA, 22 bp, Artificial Sequence
  Description of Artificial Sequence: Synthetic oligonucleotide
atgtccttcgagctctgagccc

SEQ ID NO: 7755 - DNA, 22 bp, Artificial Sequence
  Description of Artificial Sequence: Synthetic oligonucleotide
catagctgtaatggagttggcc

SEQ ID NO: 7756 - DNA, 22 bp, Artificial Sequence
  Description of Artificial Sequence: Synthetic oligonucleotide
tatctttgtcaaacaaatggca

SEQ ID NO: 7757 - DNA, 22 bp, Artificial Sequence
  Description of Artificial Sequence: Synthetic oligonucleotide
ataaagcttgtcacagcaaggt

SEQ ID NO: 7758 - DNA, 22 bp, Artificial Sequence
  Description of Artificial Sequence: Synthetic oligonucleotide
aatattctccaaacaatgtgct

SEQ ID NO: 7759 - DNA, 22 bp, Artificial Sequence
  Description of Artificial Sequence: Synthetic oligonucleotide
ttctgatggcataggagtctgt

SEQ ID NO: 7760 - DNA, 22 bp, Artificial Sequence
  Description of Artificial Sequence: Synthetic oligonucleotide
tcaacatttcttcataacacgt

SEQ ID NO: 7761 - DNA, 22 bp, Artificial Sequence
  Description of Artificial Sequence: Synthetic oligonucleotide
ataacaatctatttacacccgg

SEQ ID NO: 7762 - DNA, 22 bp, Artificial Sequence
  Description of Artificial Sequence: Synthetic oligonucleotide
ttcatcaaagaagctgtgcgca

SEQ ID NO: 7763 - DNA, 22 bp, Artificial Sequence
  Description of Artificial Sequence: Synthetic oligonucleotide
ttgacatagaggatagggatgg

SEQ ID NO: 7764 - DNA, 22 bp, Artificial Sequence
  Description of Artificial Sequence: Synthetic oligonucleotide
gatgtaggagacattgggctcc

SEQ ID NO: 7765 - DNA, 22 bp, Artificial Sequence
  Description of Artificial Sequence: Synthetic oligonucleotide
ttaagttcatagaaacgatgct

SEQ ID NO: 7766 - DNA, 22 bp, Artificial Sequence
  Description of Artificial Sequence: Synthetic oligonucleotide
tttggtgaggataagaatcgca

SEQ ID NO: 7767 - DNA, 22 bp, Artificial Sequence
  Description of Artificial Sequence: Synthetic oligonucleotide
tttccatccgacaatcttggcc

SEQ ID NO: 7768 - DNA, 22 bp, Artificial Sequence
  Description of Artificial Sequence: Synthetic oligonucleotide
aatttcaggcacagaatgacct

SEQ ID NO: 7769 - DNA, 22 bp, Artificial Sequence
  Description of Artificial Sequence: Synthetic oligonucleotide
ttaaatcgtttggaaatggcct

SEQ ID NO: 7770 - DNA, 22 bp, Artificial Sequence
  Description of Artificial Sequence: Synthetic oligonucleotide
atatgttaacactccaatgctc

SEQ ID NO: 7771 - DNA, 22 bp, Artificial Sequence
  Description of Artificial Sequence: Synthetic oligonucleotide
tttatcattgcctaagaaaggt

SEQ ID NO: 7772 - DNA, 22 bp, Artificial Sequence
  Description of Artificial Sequence: Synthetic oligonucleotide
atcaagatgaactacatcacga

SEQ ID NO: 7773 - DNA, 22 bp, Artificial Sequence
  Description of Artificial Sequence: Synthetic oligonucleotide
attcctgtagagagttattgct

SEQ ID NO: 7774 - DNA, 22 bp, Artificial Sequence
  Description of Artificial Sequence: Synthetic oligonucleotide
taatatcacgatatataatccc

SEQ ID NO: 7775 - DNA, 22 bp, Artificial Sequence
  Description of Artificial Sequence: Synthetic oligonucleotide
attctcaagcttaatatcacga

SEQ ID NO: 7776 - DNA, 22 bp, Artificial Sequence
  Description of Artificial Sequence: Synthetic oligonucleotide
ttctgaaagaagagatgttctt

SEQ ID NO: 7777 - DNA, 22 bp, Artificial Sequence
  Description of Artificial Sequence: Synthetic oligonucleotide
tttccataagctccagttccta

SEQ ID NO: 7778 - DNA, 22 bp, Artificial Sequence
  Description of Artificial Sequence: Synthetic oligonucleotide
ttgtccttcaaatctaggtcat

SEQ ID NO: 7779 - DNA, 22 bp, Artificial Sequence
  Description of Artificial Sequence: Synthetic oligonucleotide
taattcatctcgaatgactggc

SEQ ID NO: 7780 - DNA, 22 bp, Artificial Sequence
  Description of Artificial Sequence: Synthetic oligonucleotide
ataaacagagagcttctcaggc

SEQ ID NO: 7781 - DNA, 22 bp, Artificial Sequence
  Description of Artificial Sequence: Synthetic oligonucleotide
ttactcgaagaacccaggcggg

SEQ ID NO: 7782 - DNA, 22 bp, Artificial Sequence
  Description of Artificial Sequence: Synthetic oligonucleotide
ttgacttcagacatgctgagcc

SEQ ID NO: 7783 - DNA, 22 bp, Artificial Sequence
  Description of Artificial Sequence: Synthetic oligonucleotide
attatcctctgcagaaagaggt

SEQ ID NO: 7784 - DNA, 22 bp, Artificial Sequence
  Description of Artificial Sequence: Synthetic oligonucleotide
atttgaagccacgtccgctggg

SEQ ID NO: 7785 - DNA, 22 bp, Artificial Sequence
  Description of Artificial Sequence: Synthetic oligonucleotide
ttaacttccactatgagatccc

SEQ ID NO: 7786 - DNA, 22 bp, Artificial Sequence
  Description of Artificial Sequence: Synthetic oligonucleotide
aattcatctccagacctcaggc

SEQ ID NO: 7787 - DNA, 22 bp, Artificial Sequence
  Description of Artificial Sequence: Synthetic oligonucleotide
atagtagataccatagacaggg

SEQ ID NO: 7788 - DNA, 22 bp, Artificial Sequence
  Description of Artificial Sequence: Synthetic oligonucleotide
atatagacacagtctacgtcag

SEQ ID NO: 7789 - DNA, 22 bp, Artificial Sequence
  Description of Artificial Sequence: Synthetic oligonucleotide
ttaattcatcgataagaggcca

SEQ ID NO: 7790 - DNA, 22 bp, Artificial Sequence
  Description of Artificial Sequence: Synthetic oligonucleotide
ataatagaagcaacattctggg

SEQ ID NO: 7791 - DNA, 22 bp, Artificial Sequence
  Description of Artificial Sequence: Synthetic oligonucleotide
atatggttcagtgtggcagcct

SEQ ID NO: 7792 - DNA, 22 bp, Artificial Sequence
  Description of Artificial Sequence: Synthetic oligonucleotide
ttctggatgaacactagctggt

SEQ ID NO: 7793 - DNA, 22 bp, Artificial Sequence
  Description of Artificial Sequence: Synthetic oligonucleotide
ttaaagttgaagattcatcttc

SEQ ID NO: 7794 - DNA, 22 bp, Artificial Sequence
  Description of Artificial Sequence: Synthetic oligonucleotide
taagaagtggactttaccactc

SEQ ID NO: 7795 - DNA, 22 bp, Artificial Sequence
  Description of Artificial Sequence: Synthetic oligonucleotide
tatcgttctgttattgtagctg

SEQ ID NO: 7796 - DNA, 22 bp, Artificial Sequence
  Description of Artificial Sequence: Synthetic oligonucleotide
aattctatgcactcagagggtt

SEQ ID NO: 7797 - DNA, 22 bp, Artificial Sequence
  Description of Artificial Sequence: Synthetic oligonucleotide
ataaatgacagcatcagtaccc

SEQ ID NO: 7798 - DNA, 22 bp, Artificial Sequence
  Description of Artificial Sequence: Synthetic oligonucleotide
ttcagtttcaacctacaacgtt

SEQ ID NO: 7799 - DNA, 22 bp, Artificial Sequence
  Description of Artificial Sequence: Synthetic oligonucleotide
atagcatatgaaacagatgtga

SEQ ID NO: 7800 - DNA, 22 bp, Artificial Sequence
  Description of Artificial Sequence: Synthetic oligonucleotide
tacttctctaatgggcaggcat

SEQ ID NO: 7801 - DNA, 22 bp, Artificial Sequence
  Description of Artificial Sequence: Synthetic oligonucleotide
atagaggcagaacctctaagca

SEQ ID NO: 7802 - DNA, 22 bp, Artificial Sequence
  Description of Artificial Sequence: Synthetic oligonucleotide
atttacaaagagcatccctggg

SEQ ID NO: 7803 - DNA, 22 bp, Artificial Sequence
  Description of Artificial Sequence: Synthetic oligonucleotide
ttattgcagctcatttctaggg

SEQ ID NO: 7804 - DNA, 22 bp, Artificial Sequence
  Description of Artificial Sequence: Synthetic oligonucleotide
tatgtcaatgggaatctctggc

SEQ ID NO: 7805 - DNA, 22 bp, Artificial Sequence
  Description of Artificial Sequence: Synthetic oligonucleotide
taaatgcatgagtgtctgccga

SEQ ID NO: 7806 - DNA, 22 bp, Artificial Sequence
  Description of Artificial Sequence: Synthetic oligonucleotide
ttccatgtataaattattcgcc

SEQ ID NO: 7807 - DNA, 22 bp, Artificial Sequence
  Description of Artificial Sequence: Synthetic oligonucleotide
ttccaagagaggattatgtgct

SEQ ID NO: 7808 - DNA, 22 bp, Artificial Sequence
  Description of Artificial Sequence: Synthetic oligonucleotide
ttacacccagatgttctccggc

SEQ ID NO: 7809 - DNA, 22 bp, Artificial Sequence
  Description of Artificial Sequence: Synthetic oligonucleotide
ataatgaaggatgagatgccca

SEQ ID NO: 7810 - DNA, 22 bp, Artificial Sequence
  Description of Artificial Sequence: Synthetic oligonucleotide
gtctcataggtctttgaggcca

SEQ ID NO: 7811 - DNA, 22 bp, Artificial Sequence
  Description of Artificial Sequence: Synthetic oligonucleotide
ttaacttctggattcaagtggt

SEQ ID NO: 7812 - DNA, 22 bp, Artificial Sequence
  Description of Artificial Sequence: Synthetic oligonucleotide
aattctaattcctttattcgct

SEQ ID NO: 7813 - DNA, 22 bp, Artificial Sequence
  Description of Artificial Sequence: Synthetic oligonucleotide
atgtggtaataggaatagtcgt

SEQ ID NO: 7814 - DNA, 22 bp, Artificial Sequence
  Description of Artificial Sequence: Synthetic oligonucleotide
atagtgtctctgaatggctgcg

SEQ ID NO: 7815 - DNA, 22 bp, Artificial Sequence
  Description of Artificial Sequence: Synthetic oligonucleotide
ttatcagttggagattccacct

SEQ ID NO: 7816 - DNA, 22 bp, Artificial Sequence
  Description of Artificial Sequence: Synthetic oligonucleotide
atttacatgtaacgctacaggg

SEQ ID NO: 7817 - DNA, 22 bp, Artificial Sequence
  Description of Artificial Sequence: Synthetic oligonucleotide
ctgatcaagatgttcgcgggct

SEQ ID NO: 7818 - DNA, 22 bp, Artificial Sequence
  Description of Artificial Sequence: Synthetic oligonucleotide
atacactggaacttcagttcct

SEQ ID NO: 7819 - DNA, 22 bp, Artificial Sequence
  Description of Artificial Sequence: Synthetic oligonucleotide
ttccacatggaggttccagcga

SEQ ID NO: 7820 - DNA, 22 bp, Artificial Sequence
  Description of Artificial Sequence: Synthetic oligonucleotide
taatgctgtcatttcgtgactt

SEQ ID NO: 7821 - DNA, 22 bp, Artificial Sequence
  Description of Artificial Sequence: Synthetic oligonucleotide
attaaagagaaatctgtttggt

SEQ ID NO: 7822 - DNA, 22 bp, Artificial Sequence
  Description of Artificial Sequence: Synthetic oligonucleotide
aatgcaaaccatggagtctcca

SEQ ID NO: 7823 - DNA, 22 bp, Artificial Sequence
  Description of Artificial Sequence: Synthetic oligonucleotide
atttacagaaactttacatcag

SEQ ID NO: 7824 - DNA, 22 bp, Artificial Sequence
  Description of Artificial Sequence: Synthetic oligonucleotide
tttctcaattgcattctggtgg

SEQ ID NO: 7825 - DNA, 22 bp, Artificial Sequence
  Description of Artificial Sequence: Synthetic oligonucleotide
ataaacgatttctcaattgcat

SEQ ID NO: 7826 - DNA, 22 bp, Artificial Sequence
  Description of Artificial Sequence: Synthetic oligonucleotide
ttctggtagcccgctgtgggag

SEQ ID NO: 7827 - DNA, 22 bp, Artificial Sequence
  Description of Artificial Sequence: Synthetic oligonucleotide
tttaccacagattccatgacct

SEQ ID NO: 7828 - DNA, 22 bp, Artificial Sequence
  Description of Artificial Sequence: Synthetic oligonucleotide
cactttccacagaatatctgcc

SEQ ID NO: 7829 - DNA, 22 bp, Artificial Sequence
  Description of Artificial Sequence: Synthetic oligonucleotide
tttcaacatgcatgcaattcgt

SEQ ID NO: 7830 - DNA, 22 bp, Artificial Sequence
  Description of Artificial Sequence: Synthetic oligonucleotide
tagaaagtaaatattacctctg

SEQ ID NO: 7831 - DNA, 22 bp, Artificial Sequence
  Description of Artificial Sequence: Synthetic oligonucleotide
tttctctctcaggattaaggtg

SEQ ID NO: 7832 - DNA, 22 bp, Artificial Sequence
  Description of Artificial Sequence: Synthetic oligonucleotide
gtttcctctaaatggcagctcc

SEQ ID NO: 7833 - DNA, 22 bp, Artificial Sequence
  Description of Artificial Sequence: Synthetic oligonucleotide
tataaatgacagagtaacacca

SEQ ID NO: 7834 - DNA, 22 bp, Artificial Sequence
  Description of Artificial Sequence: Synthetic oligonucleotide
ttacacagtgaaacttggtgtt

SEQ ID NO: 7835 - DNA, 22 bp, Artificial Sequence
  Description of Artificial Sequence: Synthetic oligonucleotide
ttagttgtccatatcttgccat

SEQ ID NO: 7836 - DNA, 22 bp, Artificial Sequence
  Description of Artificial Sequence: Synthetic oligonucleotide
ttaacttctgtcctagacttgt

SEQ ID NO: 7837 - DNA, 22 bp, Artificial Sequence
  Description of Artificial Sequence: Synthetic oligonucleotide
ataaggtaattctctactgctt

SEQ ID NO: 7838 - DNA, 22 bp, Artificial Sequence
  Description of Artificial Sequence: Synthetic oligonucleotide
gttgaggaagatcatctgggcc

SEQ ID NO: 7839 - DNA, 22 bp, Artificial Sequence
  Description of Artificial Sequence: Synthetic oligonucleotide
taacattgagagtctggagctg

SEQ ID NO: 7840 - DNA, 22 bp, Artificial Sequence
  Description of Artificial Sequence: Synthetic oligonucleotide
cagttgaggaagatcatctggg

SEQ ID NO: 7841 - DNA, 22 bp, Artificial Sequence
  Description of Artificial Sequence: Synthetic oligonucleotide
atagtctgagaacctgttctgc

SEQ ID NO: 7842 - DNA, 22 bp, Artificial Sequence
  Description of Artificial Sequence: Synthetic oligonucleotide
tcataataggagtgtctcccac

SEQ ID NO: 7843 - DNA, 22 bp, Artificial Sequence
  Description of Artificial Sequence: Synthetic oligonucleotide
tttgatgaagtcaatgagtcct

SEQ ID NO: 7844 - DNA, 22 bp, Artificial Sequence
  Description of Artificial Sequence: Synthetic oligonucleotide
tttcataataggagtgtctccc

SEQ ID NO: 7845 - DNA, 22 bp, Artificial Sequence
  Description of Artificial Sequence: Synthetic oligonucleotide
ttaactttagaattaactcctg

SEQ ID NO: 7846 - DNA, 22 bp, Artificial Sequence
  Description of Artificial Sequence: Synthetic oligonucleotide
ttagagtttccatttctcggat

SEQ ID NO: 7847 - DNA, 22 bp, Artificial Sequence
  Description of Artificial Sequence: Synthetic oligonucleotide
tatccttaacgtagtcactgca

SEQ ID NO: 7848 - DNA, 22 bp, Artificial Sequence
  Description of Artificial Sequence: Synthetic oligonucleotide
tttagaaaggaccttaacagtt

SEQ ID NO: 7849 - DNA, 22 bp, Artificial Sequence
  Description of Artificial Sequence: Synthetic oligonucleotide
ttaaggtagcacttatccagtc

SEQ ID NO: 7850 - DNA, 22 bp, Artificial Sequence
  Description of Artificial Sequence: Synthetic oligonucleotide
atttgaatgaatgtttcctgag

SEQ ID NO: 7851 - DNA, 22 bp, Artificial Sequence
  Description of Artificial Sequence: Synthetic oligonucleotide
gtaactctgtacaaagaccgcg

SEQ ID NO: 7852 - DNA, 22 bp, Artificial Sequence
  Description of Artificial Sequence: Synthetic oligonucleotide
tttaacatagaatttagcagtt

SEQ ID NO: 7853 - DNA, 22 bp, Artificial Sequence
  Description of Artificial Sequence: Synthetic oligonucleotide
ttcgtaatagacatattgtcca

SEQ ID NO: 7854 - DNA, 22 bp, Artificial Sequence
  Description of Artificial Sequence: Synthetic oligonucleotide
ttctctatacaaagtcactgcc

SEQ ID NO: 7855 - DNA, 22 bp, Artificial Sequence
  Description of Artificial Sequence: Synthetic oligonucleotide
ttcagtgatgatgtagatgggc

SEQ ID NO: 7856 - DNA, 22 bp, Artificial Sequence
  Description of Artificial Sequence: Synthetic oligonucleotide
atttgggctgccatgtccagga

SEQ ID NO: 7857 - DNA, 22 bp, Artificial Sequence
  Description of Artificial Sequence: Synthetic oligonucleotide
gtcacgatgaatataattccgc

SEQ ID NO: 7858 - DNA, 22 bp, Artificial Sequence
  Description of Artificial Sequence: Synthetic oligonucleotide
taaatagggcagaatcgaacac

SEQ ID NO: 7859 - DNA, 22 bp, Artificial Sequence
  Description of Artificial Sequence: Synthetic oligonucleotide
tttcctctagattgaaggaggt

SEQ ID NO: 7860 - DNA, 22 bp, Artificial Sequence
  Description of Artificial Sequence: Synthetic oligonucleotide
ttgtggaagaatttgtaaagct

SEQ ID NO: 7861 - DNA, 22 bp, Artificial Sequence
  Description of Artificial Sequence: Synthetic oligonucleotide
atgggatatccaataaactgag

SEQ ID NO: 7862 - DNA, 22 bp, Artificial Sequence
  Description of Artificial Sequence: Synthetic oligonucleotide
ttgttgcaacatctcacgggat

SEQ ID NO: 7863 - DNA, 22 bp, Artificial Sequence
  Description of Artificial Sequence: Synthetic oligonucleotide
gttaatatgcagctctttccca

SEQ ID NO: 7864 - DNA, 22 bp, Artificial Sequence
  Description of Artificial Sequence: Synthetic oligonucleotide
tttagataatatttgctgagga

SEQ ID NO: 7865 - DNA, 22 bp, Artificial Sequence
  Description of Artificial Sequence: Synthetic oligonucleotide
ttcggattacatttgacttcct

SEQ ID NO: 7866 - DNA, 22 bp, Artificial Sequence
  Description of Artificial Sequence: Synthetic oligonucleotide
tatgactttcaatatacagcct

SEQ ID NO: 7867 - DNA, 22 bp, Artificial Sequence
  Description of Artificial Sequence: Synthetic oligonucleotide
taccattagaatattagctgtg

SEQ ID NO: 7868 - DNA, 22 bp, Artificial Sequence
  Description of Artificial Sequence: Synthetic oligonucleotide
tttaatacaaatagtctgacta

SEQ ID NO: 7869 - DNA, 22 bp, Artificial Sequence
  Description of Artificial Sequence: Synthetic oligonucleotide
tatcagcagctctctatgcctc

SEQ ID NO: 7870 - DNA, 22 bp, Artificial Sequence
  Description of Artificial Sequence: Synthetic oligonucleotide
ttacacagacgtttaattagct

SEQ ID NO: 7871 - DNA, 22 bp, Artificial Sequence
  Description of Artificial Sequence: Synthetic oligonucleotide
ttactgcattcctatcaaagcc

SEQ ID NO: 7872 - DNA, 22 bp, Artificial Sequence
  Description of Artificial Sequence: Synthetic oligonucleotide
ttgaattaagatgcaaattcca

SEQ ID NO: 7873 - DNA, 22 bp, Artificial Sequence
  Description of Artificial Sequence: Synthetic oligonucleotide
ctccaattgcagtttagaaggg

SEQ ID NO: 7874 - DNA, 22 bp, Artificial Sequence
  Description of Artificial Sequence: Synthetic oligonucleotide
atgtctctcccatcttctggct

SEQ ID NO: 7875 - DNA, 22 bp, Artificial Sequence
  Description of Artificial Sequence: Synthetic oligonucleotide
ttaagacacaagaagatgccct

SEQ ID NO: 7876 - DNA, 22 bp, Artificial Sequence
  Description of Artificial Sequence: Synthetic oligonucleotide
atagcgattaatactgtggtac

SEQ ID NO: 7877 - DNA, 22 bp, Artificial Sequence
  Description of Artificial Sequence: Synthetic oligonucleotide
tatagacaagagtttggtgtgc

SEQ ID NO: 7878 - DNA, 22 bp, Artificial Sequence
  Description of Artificial Sequence: Synthetic oligonucleotide
atacttctgaatggactggcgc

SEQ ID NO: 7879 - DNA, 22 bp, Artificial Sequence
  Description of Artificial Sequence: Synthetic oligonucleotide
ttataaagtcagaacagaaggg

SEQ ID NO: 7880 - DNA, 22 bp, Artificial Sequence
  Description of Artificial Sequence: Synthetic oligonucleotide
ttgatggacaacttgatctgcg

SEQ ID NO: 7881 - DNA, 22 bp, Artificial Sequence
  Description of Artificial Sequence: Synthetic oligonucleotide
agatggatgcagatggcgagac

SEQ ID NO: 7882 - DNA, 22 bp, Artificial Sequence
  Description of Artificial Sequence: Synthetic oligonucleotide
ttaattgtcaagattattccag

SEQ ID NO: 7883 - DNA, 22 bp, Artificial Sequence
  Description of Artificial Sequence: Synthetic oligonucleotide
ttactatacggtagactgactt

SEQ ID NO: 7884 - DNA, 22 bp, Artificial Sequence
  Description of Artificial Sequence: Synthetic oligonucleotide
atatacaccctcaaagtctcac

SEQ ID NO: 7885 - DNA, 22 bp, Artificial Sequence
  Description of Artificial Sequence: Synthetic oligonucleotide
ttgatgttcagcagggcctcat

SEQ ID NO: 7886 - DNA, 22 bp, Artificial Sequence
  Description of Artificial Sequence: Synthetic oligonucleotide
ttcattattgacaacttcaggt

SEQ ID NO: 7887 - DNA, 22 bp, Artificial Sequence
  Description of Artificial Sequence: Synthetic oligonucleotide
attacaattccaggtgggacga

SEQ ID NO: 7888 - DNA, 22 bp, Artificial Sequence
  Description of Artificial Sequence: Synthetic oligonucleotide
ttatcattgaagaatctatcta

SEQ ID NO: 7889 - DNA, 22 bp, Artificial Sequence
  Description of Artificial Sequence: Synthetic oligonucleotide
aatctatctaagattgacagtc

SEQ ID NO: 7890 - DNA, 22 bp, Artificial Sequence
  Description of Artificial Sequence: Synthetic oligonucleotide
ataaactgcagtaatctctgtc

SEQ ID NO: 7891 - DNA, 22 bp, Artificial Sequence
  Description of Artificial Sequence: Synthetic oligonucleotide
ttatatagcgatccaaactgat

SEQ ID NO: 7892 - DNA, 22 bp, Artificial Sequence
  Description of Artificial Sequence: Synthetic oligonucleotide
attagccagaacattaccacaa

SEQ ID NO: 7893 - DNA, 22 bp, Artificial Sequence
  Description of Artificial Sequence: Synthetic oligonucleotide
atctatgttaagagtattagct

SEQ ID NO: 7894 - DNA, 22 bp, Artificial Sequence
  Description of Artificial Sequence: Synthetic oligonucleotide
ttctcatatgtctcacgacggc

SEQ ID NO: 7895 - DNA, 22 bp, Artificial Sequence
  Description of Artificial Sequence: Synthetic oligonucleotide
ttaatctttctcaggacggcta

SEQ ID NO: 7896 - DNA, 22 bp, Artificial Sequence
  Description of Artificial Sequence: Synthetic oligonucleotide
taaatgcttgtctccatttgct

SEQ ID NO: 7897 - DNA, 22 bp, Artificial Sequence
  Description of Artificial Sequence: Synthetic oligonucleotide
ttagggaatcttgatcatggcc

SEQ ID NO: 7898 - DNA, 22 bp, Artificial Sequence
  Description of Artificial Sequence: Synthetic oligonucleotide
attctctaagaatttctgagca

SEQ ID NO: 7899 - DNA, 22 bp, Artificial Sequence
  Description of Artificial Sequence: Synthetic oligonucleotide
atatctaagaacaagaggtcca

SEQ ID NO: 7900 - DNA, 22 bp, Artificial Sequence
  Description of Artificial Sequence: Synthetic oligonucleotide
tttcattcccatgaagatccac

SEQ ID NO: 7901 - DNA, 22 bp, Artificial Sequence
  Description of Artificial Sequence: Synthetic oligonucleotide
atgatctatcactctgacccaa

SEQ ID NO: 7902 - DNA, 22 bp, Artificial Sequence
  Description of Artificial Sequence: Synthetic oligonucleotide
gagtatcaccatctaataaggc

SEQ ID NO: 7903 - DNA, 22 bp, Artificial Sequence
  Description of Artificial Sequence: Synthetic oligonucleotide
ttgttgcaacattctccatggg

SEQ ID NO: 7904 - DNA, 22 bp, Artificial Sequence
  Description of Artificial Sequence: Synthetic oligonucleotide
attggttatgacagtggcagta

SEQ ID NO: 7905 - DNA, 22 bp, Artificial Sequence
  Description of Artificial Sequence: Synthetic oligonucleotide
ttaaataaacataaacggacaa

SEQ ID NO: 7906 - DNA, 22 bp, Artificial Sequence
  Description of Artificial Sequence: Synthetic oligonucleotide
taaattggtcaaatcaatgccg

SEQ ID NO: 7907 - DNA, 22 bp, Artificial Sequence
  Description of Artificial Sequence: Synthetic oligonucleotide
tttgtgttgcacaaagagtggg

SEQ ID NO: 7908 - DNA, 22 bp, Artificial Sequence
  Description of Artificial Sequence: Synthetic oligonucleotide
tttctggagggagtagagggtg

SEQ ID NO: 7909 - DNA, 22 bp, Artificial Sequence
  Description of Artificial Sequence: Synthetic oligonucleotide
ttatcattgagacttcactcca

SEQ ID NO: 7910 - DNA, 22 bp, Artificial Sequence
  Description of Artificial Sequence: Synthetic oligonucleotide
tattcctatgtcctccagcgac

SEQ ID NO: 7911 - DNA, 22 bp, Artificial Sequence
  Description of Artificial Sequence: Synthetic oligonucleotide
tttctcaatttcatttcctggt

SEQ ID NO: 7912 - DNA, 22 bp, Artificial Sequence
  Description of Artificial Sequence: Synthetic oligonucleotide
ttaaaggtttaggcaagttctg

SEQ ID NO: 7913 - DNA, 22 bp, Artificial Sequence
  Description of Artificial Sequence: Synthetic oligonucleotide
ttagcattcaatatacacacat

SEQ ID NO: 7914 - DNA, 22 bp, Artificial Sequence
  Description of Artificial Sequence: Synthetic oligonucleotide
ataggcaataacagcataaccg

SEQ ID NO: 7915 - DNA, 22 bp, Artificial Sequence
  Description of Artificial Sequence: Synthetic oligonucleotide
attcatcttgataatgtatgca

SEQ ID NO: 7916 - DNA, 22 bp, Artificial Sequence
  Description of Artificial Sequence: Synthetic oligonucleotide
gtaatgtattccatcaggtgga

SEQ ID NO: 7917 - DNA, 22 bp, Artificial Sequence
  Description of Artificial Sequence: Synthetic oligonucleotide
ttaagggtagattatataccat

SEQ ID NO: 7918 - DNA, 22 bp, Artificial Sequence
  Description of Artificial Sequence: Synthetic oligonucleotide
tagtggtgatggttagttgcgt

SEQ ID NO: 7919 - DNA, 22 bp, Artificial Sequence
  Description of Artificial Sequence: Synthetic oligonucleotide
atattctctgaataaccgtggt

SEQ ID NO: 7920 - DNA, 22 bp, Artificial Sequence
  Description of Artificial Sequence: Synthetic oligonucleotide
ttgtatcgagacagatcggcct

SEQ ID NO: 7921 - DNA, 22 bp, Artificial Sequence
  Description of Artificial Sequence: Synthetic oligonucleotide
tttatcttcaataatctggcat

SEQ ID NO: 7922 - DNA, 22 bp, Artificial Sequence
  Description of Artificial Sequence: Synthetic oligonucleotide
ttaacataagaaatccttatgg

SEQ ID NO: 7923 - DNA, 22 bp, Artificial Sequence
  Description of Artificial Sequence: Synthetic oligonucleotide
ttaaatactcaatctgaatcca

SEQ ID NO: 7924 - DNA, 22 bp, Artificial Sequence
  Description of Artificial Sequence: Synthetic oligonucleotide
ttgtcattggatttcctctctg

SEQ ID NO: 7925 - DNA, 22 bp, Artificial Sequence
  Description of Artificial Sequence: Synthetic oligonucleotide
tttggtttgctactgctttggc

SEQ ID NO: 7926 - DNA, 22 bp, Artificial Sequence
  Description of Artificial Sequence: Synthetic oligonucleotide
atgaaagttaaagtcttggctt

SEQ ID NO: 7927 - DNA, 22 bp, Artificial Sequence
  Description of Artificial Sequence: Synthetic oligonucleotide
attcttcataagttaaggagcc

SEQ ID NO: 7928 - DNA, 22 bp, Artificial Sequence
  Description of Artificial Sequence: Synthetic oligonucleotide
tttcatcaggttcttcagaggt

SEQ ID NO: 7929 - DNA, 22 bp, Artificial Sequence
  Description of Artificial Sequence: Synthetic oligonucleotide
taaattcatgatccgtgatgcc

SEQ ID NO: 7930 - DNA, 22 bp, Artificial Sequence
  Description of Artificial Sequence: Synthetic oligonucleotide
ctggtataggaatcaaagaggg

SEQ ID NO: 7931 - DNA, 22 bp, Artificial Sequence
  Description of Artificial Sequence: Synthetic oligonucleotide
atttcttgtaacatttgccggc

SEQ ID NO: 7932 - DNA, 22 bp, Artificial Sequence
  Description of Artificial Sequence: Synthetic oligonucleotide
tttactcatgttatgctcagcc

SEQ ID NO: 7933 - DNA, 22 bp, Artificial Sequence
  Description of Artificial Sequence: Synthetic oligonucleotide
taataggctcatcatatcaccc

SEQ ID NO: 7934 - DNA, 22 bp, Artificial Sequence
  Description of Artificial Sequence: Synthetic oligonucleotide
tttcactctcatcttccttggg

SEQ ID NO: 7935 - DNA, 22 bp, Artificial Sequence
  Description of Artificial Sequence: Synthetic oligonucleotide
taaattcctaagggattcccga

SEQ ID NO: 7936 - DNA, 22 bp, Artificial Sequence
  Description of Artificial Sequence: Synthetic oligonucleotide
caatgtagaaattggcacccgc

SEQ ID NO: 7937 - DNA, 22 bp, Artificial Sequence
  Description of Artificial Sequence: Synthetic oligonucleotide
ttaatacaaagcatctaatcat

SEQ ID NO: 7938 - DNA, 22 bp, Artificial Sequence
  Description of Artificial Sequence: Synthetic oligonucleotide
atcattactcaagaaatcagct

SEQ ID NO: 7939 - DNA, 22 bp, Artificial Sequence
  Description of Artificial Sequence: Synthetic oligonucleotide
attactcaagaaatcagctcgt

SEQ ID NO: 7940 - DNA, 22 bp, Artificial Sequence
  Description of Artificial Sequence: Synthetic oligonucleotide
atatttgatgtaacactgggca

SEQ ID NO: 7941 - DNA, 22 bp, Artificial Sequence
  Description of Artificial Sequence: Synthetic oligonucleotide
ataggcatccatatcctgggca

SEQ ID NO: 7942 - DNA, 22 bp, Artificial Sequence
  Description of Artificial Sequence: Synthetic oligonucleotide
ttccacaaacacatcaatggcc

SEQ ID NO: 7943 - DNA, 22 bp, Artificial Sequence
  Description of Artificial Sequence: Synthetic oligonucleotide
tttgggaaacaatatacgagct

SEQ ID NO: 7944 - DNA, 22 bp, Artificial Sequence
  Description of Artificial Sequence: Synthetic oligonucleotide
tttaataatcattgaaagggca

SEQ ID NO: 7945 - DNA, 22 bp, Artificial Sequence
  Description of Artificial Sequence: Synthetic oligonucleotide
aatacgattaacaatacatcgc

SEQ ID NO: 7946 - DNA, 22 bp, Artificial Sequence
  Description of Artificial Sequence: Synthetic oligonucleotide
ataaagtgatctatccactgga

SEQ ID NO: 7947 - DNA, 22 bp, Artificial Sequence
  Description of Artificial Sequence: Synthetic oligonucleotide
atattgctgtaaatgatgtcca

SEQ ID NO: 7948 - DNA, 22 bp, Artificial Sequence
  Description of Artificial Sequence: Synthetic oligonucleotide
ataaaggtgcagatgaactcat

SEQ ID NO: 7949 - DNA, 22 bp, Artificial Sequence
  Description of Artificial Sequence: Synthetic oligonucleotide
ataaatccatatacagggccct

SEQ ID NO: 7950 - DNA, 22 bp, Artificial Sequence
  Description of Artificial Sequence: Synthetic oligonucleotide
atacttgatcctgcggtcgggc

SEQ ID NO: 7951 - DNA, 22 bp, Artificial Sequence
  Description of Artificial Sequence: Synthetic oligonucleotide
taattatatgacctcacgccga

SEQ ID NO: 7952 - DNA, 22 bp, Artificial Sequence
  Description of Artificial Sequence: Synthetic oligonucleotide
tctcatcttgaaagagtgtggc

SEQ ID NO: 7953 - DNA, 22 bp, Artificial Sequence
  Description of Artificial Sequence: Synthetic oligonucleotide
cttcttcacccgattaaggtcc

SEQ ID NO: 7954 - DNA, 22 bp, Artificial Sequence
  Description of Artificial Sequence: Synthetic oligonucleotide
ataatcattgaacttgattgca

SEQ ID NO: 7955 - DNA, 22 bp, Artificial Sequence
  Description of Artificial Sequence: Synthetic oligonucleotide
ttagtgaatgatattgttagcc

SEQ ID NO: 7956 - DNA, 22 bp, Artificial Sequence
  Description of Artificial Sequence: Synthetic oligonucleotide
tttcattggaagaatcaggcga

SEQ ID NO: 7957 - DNA, 22 bp, Artificial Sequence
  Description of Artificial Sequence: Synthetic oligonucleotide
aatacgattgagaatacatcgt

SEQ ID NO: 7958 - DNA, 22 bp, Artificial Sequence
  Description of Artificial Sequence: Synthetic oligonucleotide
taatctgatgaggtctggtggt

SEQ ID NO: 7959 - DNA, 22 bp, Artificial Sequence
  Description of Artificial Sequence: Synthetic oligonucleotide
tttgattgtagattaattcccg

SEQ ID NO: 7960 - DNA, 22 bp, Artificial Sequence
  Description of Artificial Sequence: Synthetic oligonucleotide
atttctctggcattcttctcgg

SEQ ID NO: 7961 - DNA, 22 bp, Artificial Sequence
  Description of Artificial Sequence: Synthetic oligonucleotide
ttcacatttcacagtaatttac

SEQ ID NO: 7962 - DNA, 22 bp, Artificial Sequence
  Description of Artificial Sequence: Synthetic oligonucleotide
tttcacagtaatttacaggcgc

SEQ ID NO: 7963 - DNA, 22 bp, Artificial Sequence
  Description of Artificial Sequence: Synthetic oligonucleotide
ataaaccagcgggttctcggcc

SEQ ID NO: 7964 - DNA, 22 bp, Artificial Sequence
  Description of Artificial Sequence: Synthetic oligonucleotide
tttaacaactgctgaaactgct

SEQ ID NO: 7965 - DNA, 22 bp, Artificial Sequence
  Description of Artificial Sequence: Synthetic oligonucleotide
ttaaactttgatcatatgacct

SEQ ID NO: 7966 - DNA, 22 bp, Artificial Sequence
  Description of Artificial Sequence: Synthetic oligonucleotide
ttacagtttcttcttctatgcc

SEQ ID NO: 7967 - DNA, 22 bp, Artificial Sequence
  Description of Artificial Sequence: Synthetic oligonucleotide
tttgtatatcagaccggagctg

SEQ ID NO: 7968 - DNA, 22 bp, Artificial Sequence
  Description of Artificial Sequence: Synthetic oligonucleotide
atatcagaccggagctgctgcc

SEQ ID NO: 7969 - DNA, 22 bp, Artificial Sequence
  Description of Artificial Sequence: Synthetic oligonucleotide
gtcatacaggagcttcagggca

SEQ ID NO: 7970 - DNA, 22 bp, Artificial Sequence
  Description of Artificial Sequence: Synthetic oligonucleotide
ttctccttagatgtgtagagta

SEQ ID NO: 7971 - DNA, 22 bp, Artificial Sequence
  Description of Artificial Sequence: Synthetic oligonucleotide
cataatagggagtatagcaggg

SEQ ID NO: 7972 - DNA, 22 bp, Artificial Sequence
  Description of Artificial Sequence: Synthetic oligonucleotide
tttcttgatcatctttgcacgc

SEQ ID NO: 7973 - DNA, 22 bp, Artificial Sequence
  Description of Artificial Sequence: Synthetic oligonucleotide
ttattgtcacgcattcacagtg

SEQ ID NO: 7974 - DNA, 22 bp, Artificial Sequence
  Description of Artificial Sequence: Synthetic oligonucleotide
atgtagtatcagccagtcctgt

SEQ ID NO: 7975 - DNA, 22 bp, Artificial Sequence
  Description of Artificial Sequence: Synthetic oligonucleotide
atacccaaagaactttgcctct

SEQ ID NO: 7976 - DNA, 22 bp, Artificial Sequence
  Description of Artificial Sequence: Synthetic oligonucleotide
tttctcaatctcgtcccagggc

SEQ ID NO: 7977 - DNA, 22 bp, Artificial Sequence
  Description of Artificial Sequence: Synthetic oligonucleotide
tattgttcccatatccataggc

SEQ ID NO: 7978 - DNA, 22 bp, Artificial Sequence
  Description of Artificial Sequence: Synthetic oligonucleotide
ttagactggcattaaatcagcc

SEQ ID NO: 7979 - DNA, 22 bp, Artificial Sequence
  Description of Artificial Sequence: Synthetic oligonucleotide
ataagtaatcacaatggtgcca

SEQ ID NO: 7980 - DNA, 22 bp, Artificial Sequence
  Description of Artificial Sequence: Synthetic oligonucleotide
taaagtcatcagcaaacttggt

SEQ ID NO: 7981 - DNA, 22 bp, Artificial Sequence
  Description of Artificial Sequence: Synthetic oligonucleotide
attcatcatgtaattggcagca

SEQ ID NO: 7982 - DNA, 22 bp, Artificial Sequence
  Description of Artificial Sequence: Synthetic oligonucleotide
tttaaagtattcaaagtaaggc

SEQ ID NO: 7983 - DNA, 22 bp, Artificial Sequence
  Description of Artificial Sequence: Synthetic oligonucleotide
tttcaccttcataggagcatcg

SEQ ID NO: 7984 - DNA, 22 bp, Artificial Sequence
  Description of Artificial Sequence: Synthetic oligonucleotide
tttataagacaccctggaggcc

SEQ ID NO: 7985 - DNA, 22 bp, Artificial Sequence
  Description of Artificial Sequence: Synthetic oligonucleotide
ttaaatattgctgtgatgaggc

SEQ ID NO: 7986 - DNA, 22 bp, Artificial Sequence
  Description of Artificial Sequence: Synthetic oligonucleotide
tagacgcatcagtttattggct

SEQ ID NO: 7987 - DNA, 22 bp, Artificial Sequence
  Description of Artificial Sequence: Synthetic oligonucleotide
ttagatgatcaataaacctgga

SEQ ID NO: 7988 - DNA, 22 bp, Artificial Sequence
  Description of Artificial Sequence: Synthetic oligonucleotide
attgctttgaggtggcagggtt

SEQ ID NO: 7989 - DNA, 22 bp, Artificial Sequence
  Description of Artificial Sequence: Synthetic oligonucleotide
aataaccaagaggatctggctg

SEQ ID NO: 7990 - DNA, 22 bp, Artificial Sequence
  Description of Artificial Sequence: Synthetic oligonucleotide
atataaattccattgcactgct

SEQ ID NO: 7991 - DNA, 22 bp, Artificial Sequence
  Description of Artificial Sequence: Synthetic oligonucleotide
tcttcaaatgccattgatgcag

SEQ ID NO: 7992 - DNA, 22 bp, Artificial Sequence
  Description of Artificial Sequence: Synthetic oligonucleotide
aattccattgcactgctgtgct

SEQ ID NO: 7993 - DNA, 22 bp, Artificial Sequence
  Description of Artificial Sequence: Synthetic oligonucleotide
taacaggaagaaatagtaagtg

SEQ ID NO: 7994 - DNA, 22 bp, Artificial Sequence
  Description of Artificial Sequence: Synthetic oligonucleotide
taaactcatccctgaatatcct

SEQ ID NO: 7995 - DNA, 22 bp, Artificial Sequence
  Description of Artificial Sequence: Synthetic oligonucleotide
ttctctgatgagtatagtattg

SEQ ID NO: 7996 - DNA, 22 bp, Artificial Sequence
  Description of Artificial Sequence: Synthetic oligonucleotide
ttgtctgacagaattaatcgtt

SEQ ID NO: 7997 - DNA, 22 bp, Artificial Sequence
  Description of Artificial Sequence: Synthetic oligonucleotide
ttctagtgagaagttcacattc

SEQ ID NO: 7998 - DNA, 22 bp, Artificial Sequence
  Description of Artificial Sequence: Synthetic oligonucleotide
ttatctctgaagtttcgagcca

SEQ ID NO: 7999 - DNA, 22 bp, Artificial Sequence
  Description of Artificial Sequence: Synthetic oligonucleotide
ttaaattcccagtcagcaactg

SEQ ID NO: 8000 - DNA, 22 bp, Artificial Sequence
  Description of Artificial Sequence: Synthetic oligonucleotide
ttgaacaagttgataaagtcct

SEQ ID NO: 8001 - DNA, 22 bp, Artificial Sequence
  Description of Artificial Sequence: Synthetic oligonucleotide
taatcatctgggatgattgctg

SEQ ID NO: 8002 - DNA, 22 bp, Artificial Sequence
  Description of Artificial Sequence: Synthetic oligonucleotide
tatacatataagttgaggactt

SEQ ID NO: 8003 - DNA, 22 bp, Artificial Sequence
  Description of Artificial Sequence: Synthetic oligonucleotide
atttcccagaatactaagccca

SEQ ID NO: 8004 - DNA, 22 bp, Artificial Sequence
  Description of Artificial Sequence: Synthetic oligonucleotide
gttcctcactactatatgaggt

SEQ ID NO: 8005 - DNA, 22 bp, Artificial Sequence
  Description of Artificial Sequence: Synthetic oligonucleotide
taagtctttcaacgtagtaccc

SEQ ID NO: 8006 - DNA, 22 bp, Artificial Sequence
  Description of Artificial Sequence: Synthetic oligonucleotide
ttcagacatgagccatagacct

SEQ ID NO: 8007 - DNA, 22 bp, Artificial Sequence
  Description of Artificial Sequence: Synthetic oligonucleotide
tttgtggaagtctagaaatgct

SEQ ID NO: 8008 - DNA, 22 bp, Artificial Sequence
  Description of Artificial Sequence: Synthetic oligonucleotide
tagtttctagaattaatgagca

SEQ ID NO: 8009 - DNA, 22 bp, Artificial Sequence
  Description of Artificial Sequence: Synthetic oligonucleotide
ttctagaattaatgagcaacgt

SEQ ID NO: 8010 - DNA, 22 bp, Artificial Sequence
  Description of Artificial Sequence: Synthetic oligonucleotide
ttagtagttcattagtcctggt

SEQ ID NO: 8011 - DNA, 22 bp, Artificial Sequence
  Description of Artificial Sequence: Synthetic oligonucleotide
ttgtttcaaattctgatgaccc

SEQ ID NO: 8012 - DNA, 22 bp, Artificial Sequence
  Description of Artificial Sequence: Synthetic oligonucleotide
atattctcctcaagagactgct

SEQ ID NO: 8013 - DNA, 22 bp, Artificial Sequence
  Description of Artificial Sequence: Synthetic oligonucleotide
ttctgcaagaataagatcacca

SEQ ID NO: 8014 - DNA, 22 bp, Artificial Sequence
  Description of Artificial Sequence: Synthetic oligonucleotide
tacattcatcatccaagacgct

SEQ ID NO: 8015 - DNA, 22 bp, Artificial Sequence
  Description of Artificial Sequence: Synthetic oligonucleotide
ataaatcttgagacagcgtcca

SEQ ID NO: 8016 - DNA, 22 bp, Artificial Sequence
  Description of Artificial Sequence: Synthetic oligonucleotide
taattcgattagagagtgtcac

SEQ ID NO: 8017 - DNA, 22 bp, Artificial Sequence
  Description of Artificial Sequence: Synthetic oligonucleotide
ctgtctattccaagtaactggc

SEQ ID NO: 8018 - DNA, 22 bp, Artificial Sequence
  Description of Artificial Sequence: Synthetic oligonucleotide
tttgaggtaacaatagtggccc

SEQ ID NO: 8019 - DNA, 22 bp, Artificial Sequence
  Description of Artificial Sequence: Synthetic oligonucleotide
ttcaagtaacaaaccatctgct

SEQ ID NO: 8020 - DNA, 22 bp, Artificial Sequence
  Description of Artificial Sequence: Synthetic oligonucleotide
tttcagtgtgggacccagggtc

SEQ ID NO: 8021 - DNA, 22 bp, Artificial Sequence
  Description of Artificial Sequence: Synthetic oligonucleotide
tatttgtctgacttgttcacag

SEQ ID NO: 8022 - DNA, 22 bp, Artificial Sequence
  Description of Artificial Sequence: Synthetic oligonucleotide
tttgtctgacttgttcacagtt

SEQ ID NO: 8023 - DNA, 22 bp, Artificial Sequence
  Description of Artificial Sequence: Synthetic oligonucleotide
gttgaactggcccttcagggct

SEQ ID NO: 8024 - DNA, 22 bp, Artificial Sequence
  Description of Artificial Sequence: Synthetic oligonucleotide
tttataactggttacacgttgg

SEQ ID NO: 8025 - DNA, 22 bp, Artificial Sequence
  Description of Artificial Sequence: Synthetic oligonucleotide
tttcttaaatacagtaatgtca

SEQ ID NO: 8026 - DNA, 22 bp, Artificial Sequence
  Description of Artificial Sequence: Synthetic oligonucleotide
taacgtttccacattaggttgg

SEQ ID NO: 8027 - DNA, 22 bp, Artificial Sequence
  Description of Artificial Sequence: Synthetic oligonucleotide
aacaataagcaaacaatgctta

SEQ ID NO: 8028 - DNA, 22 bp, Artificial Sequence
  Description of Artificial Sequence: Synthetic oligonucleotide
atgctgatgggcttgatgacag

SEQ ID NO: 8029 - DNA, 22 bp, Artificial Sequence
  Description of Artificial Sequence: Synthetic oligonucleotide
ttaaagtcccgcatcttgtcgt

SEQ ID NO: 8030 - DNA, 22 bp, Artificial Sequence
  Description of Artificial Sequence: Synthetic oligonucleotide
atcacagacgtgacaattgcgg

SEQ ID NO: 8031 - DNA, 22 bp, Artificial Sequence
  Description of Artificial Sequence: Synthetic oligonucleotide
tttgagcaaagctgggtgcgcg

SEQ ID NO: 8032 - DNA, 22 bp, Artificial Sequence
  Description of Artificial Sequence: Synthetic oligonucleotide
atcttcaatcttaaagtcccgc

SEQ ID NO: 8033 - DNA, 22 bp, Artificial Sequence
  Description of Artificial Sequence: Synthetic oligonucleotide
taatgtcagaacattcagacca

SEQ ID NO: 8034 - DNA, 22 bp, Artificial Sequence
  Description of Artificial Sequence: Synthetic oligonucleotide
gtattatagcccagctcgtgga

SEQ ID NO: 8035 - DNA, 22 bp, Artificial Sequence
  Description of Artificial Sequence: Synthetic oligonucleotide
ataactagacaaggtctgagca

SEQ ID NO: 8036 - DNA, 22 bp, Artificial Sequence
  Description of Artificial Sequence: Synthetic oligonucleotide
ataactgtagttactctgtcca

SEQ ID NO: 8037 - DNA, 22 bp, Artificial Sequence
  Description of Artificial Sequence: Synthetic oligonucleotide
tacagaaaggacatattcacca

SEQ ID NO: 8038 - DNA, 22 bp, Artificial Sequence
  Description of Artificial Sequence: Synthetic oligonucleotide
ttccataatgatgtagacaggc

SEQ ID NO: 8039 - DNA, 22 bp, Artificial Sequence
  Description of Artificial Sequence: Synthetic oligonucleotide
attccacatgatctcatttgcc

SEQ ID NO: 8040 - DNA, 22 bp, Artificial Sequence
  Description of Artificial Sequence: Synthetic oligonucleotide
atagattcaaatttggatagcc

SEQ ID NO: 8041 - DNA, 22 bp, Artificial Sequence
  Description of Artificial Sequence: Synthetic oligonucleotide
tttcttgttctttagcagccgt

SEQ ID NO: 8042 - DNA, 22 bp, Artificial Sequence
  Description of Artificial Sequence: Synthetic oligonucleotide
taatccttgtacataaattgca

SEQ ID NO: 8043 - DNA, 22 bp, Artificial Sequence
  Description of Artificial Sequence: Synthetic oligonucleotide
atattgacttggagcttggctg

SEQ ID NO: 8044 - DNA, 22 bp, Artificial Sequence
  Description of Artificial Sequence: Synthetic oligonucleotide
ttatggaaagatcaacatgctc

SEQ ID NO: 8045 - DNA, 22 bp, Artificial Sequence
  Description of Artificial Sequence: Synthetic oligonucleotide
attcagtcccaaaccaatggtt

SEQ ID NO: 8046 - DNA, 22 bp, Artificial Sequence
  Description of Artificial Sequence: Synthetic oligonucleotide
ttccaataagaggtaggtgttc

SEQ ID NO: 8047 - DNA, 22 bp, Artificial Sequence
  Description of Artificial Sequence: Synthetic oligonucleotide
taacaacaataatttgccacct

SEQ ID NO: 8048 - DNA, 22 bp, Artificial Sequence
  Description of Artificial Sequence: Synthetic oligonucleotide
tataacaatgagcttcacatgt

SEQ ID NO: 8049 - DNA, 22 bp, Artificial Sequence
  Description of Artificial Sequence: Synthetic oligonucleotide
ataaatcttccacttcaagcga

SEQ ID NO: 8050 - DNA, 22 bp, Artificial Sequence
  Description of Artificial Sequence: Synthetic oligonucleotide
acttgatatggtttcacatcct

SEQ ID NO: 8051 - DNA, 22 bp, Artificial Sequence
  Description of Artificial Sequence: Synthetic oligonucleotide
taatagtgggacatctgcacat

SEQ ID NO: 8052 - DNA, 22 bp, Artificial Sequence
  Description of Artificial Sequence: Synthetic oligonucleotide
tagaagtctgaggagagaagcc

SEQ ID NO: 8053 - DNA, 22 bp, Artificial Sequence
  Description of Artificial Sequence: Synthetic oligonucleotide
ttcttgagacggcagtactggc

SEQ ID NO: 8054 - DNA, 22 bp, Artificial Sequence
  Description of Artificial Sequence: Synthetic oligonucleotide
tttcactaagacattacgggct

SEQ ID NO: 8055 - DNA, 22 bp, Artificial Sequence
  Description of Artificial Sequence: Synthetic oligonucleotide
ataaatcagggatttctcgcgt

SEQ ID NO: 8056 - DNA, 22 bp, Artificial Sequence
  Description of Artificial Sequence: Synthetic oligonucleotide
tacgaagttgagcttgattggg

SEQ ID NO: 8057 - DNA, 22 bp, Artificial Sequence
  Description of Artificial Sequence: Synthetic oligonucleotide
taatgtatacactccagagcca

SEQ ID NO: 8058 - DNA, 22 bp, Artificial Sequence
  Description of Artificial Sequence: Synthetic oligonucleotide
attaaagaggagatcttggccg

SEQ ID NO: 8059 - DNA, 22 bp, Artificial Sequence
  Description of Artificial Sequence: Synthetic oligonucleotide
gtttcatcagttaatgagtcct

SEQ ID NO: 8060 - DNA, 22 bp, Artificial Sequence
  Description of Artificial Sequence: Synthetic oligonucleotide
gtttcctacaaagtgagtggcc

SEQ ID NO: 8061 - DNA, 22 bp, Artificial Sequence
  Description of Artificial Sequence: Synthetic oligonucleotide
cttgatactcaaagccaacggc

SEQ ID NO: 8062 - DNA, 22 bp, Artificial Sequence
  Description of Artificial Sequence: Synthetic oligonucleotide
gtgtatgttgatatgctcctgg

SEQ ID NO: 8063 - DNA, 22 bp, Artificial Sequence
  Description of Artificial Sequence: Synthetic oligonucleotide
ttcaccaagatgtttctggcag

SEQ ID NO: 8064 - DNA, 22 bp, Artificial Sequence
  Description of Artificial Sequence: Synthetic oligonucleotide
ttctgtgatgatcatgatcggc

SEQ ID NO: 8065 - DNA, 22 bp, Artificial Sequence
  Description of Artificial Sequence: Synthetic oligonucleotide
aattgtgattactgaggtagtt

SEQ ID NO: 8066 - DNA, 22 bp, Artificial Sequence
  Description of Artificial Sequence: Synthetic oligonucleotide
ttccagatgcagaatatgcggg

SEQ ID NO: 8067 - DNA, 22 bp, Artificial Sequence
  Description of Artificial Sequence: Synthetic oligonucleotide
atacgtatatagtgtcaggctt

SEQ ID NO: 8068 - DNA, 22 bp, Artificial Sequence
  Description of Artificial Sequence: Synthetic oligonucleotide
attagagataacatttcttggt

SEQ ID NO: 8069 - DNA, 22 bp, Artificial Sequence
  Description of Artificial Sequence: Synthetic oligonucleotide
atatagtgtcaggcttgaggct

SEQ ID NO: 8070 - DNA, 22 bp, Artificial Sequence
  Description of Artificial Sequence: Synthetic oligonucleotide
aatagtatcgcagggctctgct

SEQ ID NO: 8071 - DNA, 22 bp, Artificial Sequence
  Description of Artificial Sequence: Synthetic oligonucleotide
attccgttacacactttgcggc

SEQ ID NO: 8072 - DNA, 22 bp, Artificial Sequence
  Description of Artificial Sequence: Synthetic oligonucleotide
atgtattcaggcactgggagga

SEQ ID NO: 8073 - DNA, 22 bp, Artificial Sequence
  Description of Artificial Sequence: Synthetic oligonucleotide
atctgtcaccacataattacgg

SEQ ID NO: 8074 - DNA, 22 bp, Artificial Sequence
  Description of Artificial Sequence: Synthetic oligonucleotide
ttctcaaaggcatggaggtccg

SEQ ID NO: 8075 - DNA, 22 bp, Artificial Sequence
  Description of Artificial Sequence: Synthetic oligonucleotide
atttccaaattcccaaggacca

SEQ ID NO: 8076 - DNA, 22 bp, Artificial Sequence
  Description of Artificial Sequence: Synthetic oligonucleotide
ataaataagaacacagccgcag

SEQ ID NO: 8077 - DNA, 22 bp, Artificial Sequence
  Description of Artificial Sequence: Synthetic oligonucleotide
ctaagtaatccctttacaaggt

SEQ ID NO: 8078 - DNA, 22 bp, Artificial Sequence
  Description of Artificial Sequence: Synthetic oligonucleotide
tttactgtcctagaaatgccct

SEQ ID NO: 8079 - DNA, 22 bp, Artificial Sequence
  Description of Artificial Sequence: Synthetic oligonucleotide
ttattcaggcaaatgctcactg

SEQ ID NO: 8080 - DNA, 22 bp, Artificial Sequence
  Description of Artificial Sequence: Synthetic oligonucleotide
tttacacttgctgtcattgctc

SEQ ID NO: 8081 - DNA, 22 bp, Artificial Sequence
  Description of Artificial Sequence: Synthetic oligonucleotide
ttcaggcatgatggtgtttgca

SEQ ID NO: 8082 - DNA, 22 bp, Artificial Sequence
  Description of Artificial Sequence: Synthetic oligonucleotide
ctcttcttcaatcttgtgctgt

SEQ ID NO: 8083 - DNA, 22 bp, Artificial Sequence
  Description of Artificial Sequence: Synthetic oligonucleotide
ataagaaccgaggtctggaggg

SEQ ID NO: 8084 - DNA, 22 bp, Artificial Sequence
  Description of Artificial Sequence: Synthetic oligonucleotide
ttaagatgtccagacagatcac

SEQ ID NO: 8085 - DNA, 22 bp, Artificial Sequence
  Description of Artificial Sequence: Synthetic oligonucleotide
ttcatctagatcattctctgga

SEQ ID NO: 8086 - DNA, 22 bp, Artificial Sequence
  Description of Artificial Sequence: Synthetic oligonucleotide
ataaccgataatataacctcgc

SEQ ID NO: 8087 - DNA, 22 bp, Artificial Sequence
  Description of Artificial Sequence: Synthetic oligonucleotide
aataattgagccagaatctcct

SEQ ID NO: 8088 - DNA, 22 bp, Artificial Sequence
  Description of Artificial Sequence: Synthetic oligonucleotide
aataatcaactgggtcagtggg

SEQ ID NO: 8089 - DNA, 22 bp, Artificial Sequence
  Description of Artificial Sequence: Synthetic oligonucleotide
caaagttaacatcaacgctgct

SEQ ID NO: 8090 - DNA, 22 bp, Artificial Sequence
  Description of Artificial Sequence: Synthetic oligonucleotide
atcaaagttaacatcaacgctg

SEQ ID NO: 8091 - DNA, 22 bp, Artificial Sequence
  Description of Artificial Sequence: Synthetic oligonucleotide
ataactgttgccctcatagctc

SEQ ID NO: 8092 - DNA, 22 bp, Artificial Sequence
  Description of Artificial Sequence: Synthetic oligonucleotide
tttgacatagaggtggatggcg

SEQ ID NO: 8093 - DNA, 22 bp, Artificial Sequence
  Description of Artificial Sequence: Synthetic oligonucleotide
tttcagattcctttagttacag

SEQ ID NO: 8094 - DNA, 22 bp, Artificial Sequence
  Description of Artificial Sequence: Synthetic oligonucleotide
attcctatttccatgctttccg

SEQ ID NO: 8095 - DNA, 22 bp, Artificial Sequence
  Description of Artificial Sequence: Synthetic oligonucleotide
ttaaactgccaggaaagaggct

SEQ ID NO: 8096 - DNA, 22 bp, Artificial Sequence
  Description of Artificial Sequence: Synthetic oligonucleotide
ttatactataggatttgggccc

SEQ ID NO: 8097 - DNA, 22 bp, Artificial Sequence
  Description of Artificial Sequence: Synthetic oligonucleotide
taacagtttcatcaaatcgccc

SEQ ID NO: 8098 - DNA, 22 bp, Artificial Sequence
  Description of Artificial Sequence: Synthetic oligonucleotide
tatatgtatgaaagattcatga

SEQ ID NO: 8099 - DNA, 22 bp, Artificial Sequence
  Description of Artificial Sequence: Synthetic oligonucleotide
tactgtcttgacacatggtcat

SEQ ID NO: 8100 - DNA, 22 bp, Artificial Sequence
  Description of Artificial Sequence: Synthetic oligonucleotide
tactgggatcagtttacacgcc

SEQ ID NO: 8101 - DNA, 22 bp, Artificial Sequence
  Description of Artificial Sequence: Synthetic oligonucleotide
tttgattactgtcttgacacat

SEQ ID NO: 8102 - DNA, 22 bp, Artificial Sequence
  Description of Artificial Sequence: Synthetic oligonucleotide
attgtggaacagagtgtggttg

SEQ ID NO: 8103 - DNA, 22 bp, Artificial Sequence
  Description of Artificial Sequence: Synthetic oligonucleotide
ctattgtggaacagagtgtggt

SEQ ID NO: 8104 - DNA, 22 bp, Artificial Sequence
  Description of Artificial Sequence: Synthetic oligonucleotide
tatacttctcgacgtaagggac

SEQ ID NO: 8105 - DNA, 22 bp, Artificial Sequence
  Description of Artificial Sequence: Synthetic oligonucleotide
tttcattgtgagttgatctgct

SEQ ID NO: 8106 - DNA, 22 bp, Artificial Sequence
  Description of Artificial Sequence: Synthetic oligonucleotide
tttgttaataaactcaacgtag

SEQ ID NO: 8107 - DNA, 22 bp, Artificial Sequence
  Description of Artificial Sequence: Synthetic oligonucleotide
tttctttatgtgcaatttggct

SEQ ID NO: 8108 - DNA, 22 bp, Artificial Sequence
  Description of Artificial Sequence: Synthetic oligonucleotide
ttatttattggaacccaggccc

SEQ ID NO: 8109 - DNA, 22 bp, Artificial Sequence
  Description of Artificial Sequence: Synthetic oligonucleotide
ataaactccctgcttgtcccgt

SEQ ID NO: 8110 - DNA, 22 bp, Artificial Sequence
  Description of Artificial Sequence: Synthetic oligonucleotide
atatccgacaaggaaatccggc

SEQ ID NO: 8111 - DNA, 22 bp, Artificial Sequence
  Description of Artificial Sequence: Synthetic oligonucleotide
ataactgaggacaacatctctg

SEQ ID NO: 8112 - DNA, 22 bp, Artificial Sequence
  Description of Artificial Sequence: Synthetic oligonucleotide
caagcatataatattaattggc

SEQ ID NO: 8113 - DNA, 22 bp, Artificial Sequence
  Description of Artificial Sequence: Synthetic oligonucleotide
tacattgatcatgttaaggtca

SEQ ID NO: 8114 - DNA, 22 bp, Artificial Sequence
  Description of Artificial Sequence: Synthetic oligonucleotide
tatgtatttaaatgtcaaggca

SEQ ID NO: 8115 - DNA, 22 bp, Artificial Sequence
  Description of Artificial Sequence: Synthetic oligonucleotide
ttgaatttccaaatgaagggct

SEQ ID NO: 8116 - DNA, 22 bp, Artificial Sequence
  Description of Artificial Sequence: Synthetic oligonucleotide
atgatccatgaaattgtaagag

SEQ ID NO: 8117 - DNA, 22 bp, Artificial Sequence
  Description of Artificial Sequence: Synthetic oligonucleotide
ttgtaagagcgtgttatgggtt

SEQ ID NO: 8118 - DNA, 22 bp, Artificial Sequence
  Description of Artificial Sequence: Synthetic oligonucleotide
attccttgtccataaaggtcgt

SEQ ID NO: 8119 - DNA, 22 bp, Artificial Sequence
  Description of Artificial Sequence: Synthetic oligonucleotide
ttaggacaccatagaaattcta

SEQ ID NO: 8120 - DNA, 22 bp, Artificial Sequence
  Description of Artificial Sequence: Synthetic oligonucleotide
ttatctcctaacttgccttctg

SEQ ID NO: 8121 - DNA, 22 bp, Artificial Sequence
  Description of Artificial Sequence: Synthetic oligonucleotide
ttaaaccttaggtcaccgggat

SEQ ID NO: 8122 - DNA, 22 bp, Artificial Sequence
  Description of Artificial Sequence: Synthetic oligonucleotide
atcaacatgggaggaatatcca

SEQ ID NO: 8123 - DNA, 22 bp, Artificial Sequence
  Description of Artificial Sequence: Synthetic oligonucleotide
taacagctggatatactctggc

SEQ ID NO: 8124 - DNA, 22 bp, Artificial Sequence
  Description of Artificial Sequence: Synthetic oligonucleotide
atatccagctggttgatggctt

SEQ ID NO: 8125 - DNA, 22 bp, Artificial Sequence
  Description of Artificial Sequence: Synthetic oligonucleotide
atcgattaacagctggatatac

SEQ ID NO: 8126 - DNA, 22 bp, Artificial Sequence
  Description of Artificial Sequence: Synthetic oligonucleotide
ttatagattactgcaccgaggt

SEQ ID NO: 8127 - DNA, 22 bp, Artificial Sequence
  Description of Artificial Sequence: Synthetic oligonucleotide
ttatcctctgtggagtactcct

SEQ ID NO: 8128 - DNA, 22 bp, Artificial Sequence
  Description of Artificial Sequence: Synthetic oligonucleotide
ttaagctgatgtctcccgaggt

SEQ ID NO: 8129 - DNA, 22 bp, Artificial Sequence
  Description of Artificial Sequence: Synthetic oligonucleotide
gaagtattccaacttgtcccgc

SEQ ID NO: 8130 - DNA, 22 bp, Artificial Sequence
  Description of Artificial Sequence: Synthetic oligonucleotide
atttgatatgcgttagtaagtc

SEQ ID NO: 8131 - DNA, 22 bp, Artificial Sequence
  Description of Artificial Sequence: Synthetic oligonucleotide
atttaagataactgagattcac

SEQ ID NO: 8132 - DNA, 22 bp, Artificial Sequence
  Description of Artificial Sequence: Synthetic oligonucleotide
ttaagataactgagattcacga

SEQ ID NO: 8133 - DNA, 22 bp, Artificial Sequence
  Description of Artificial Sequence: Synthetic oligonucleotide
ttctggtctcagagtcaaaggg

SEQ ID NO: 8134 - DNA, 22 bp, Artificial Sequence
  Description of Artificial Sequence: Synthetic oligonucleotide
atggaaattactttagattgct

SEQ ID NO: 8135 - DNA, 22 bp, Artificial Sequence
  Description of Artificial Sequence: Synthetic oligonucleotide
tttgagtagaagaatctaagcg

SEQ ID NO: 8136 - DNA, 22 bp, Artificial Sequence
  Description of Artificial Sequence: Synthetic oligonucleotide
ttaagttagggaaattatcgga

SEQ ID NO: 8137 - DNA, 22 bp, Artificial Sequence
  Description of Artificial Sequence: Synthetic oligonucleotide
tttaaacagaggaggagatcca

SEQ ID NO: 8138 - DNA, 22 bp, Artificial Sequence
  Description of Artificial Sequence: Synthetic oligonucleotide
tttcatatggagtcaacacgac

SEQ ID NO: 8139 - DNA, 22 bp, Artificial Sequence
  Description of Artificial Sequence: Synthetic oligonucleotide
attgacaagaagtctcagtgca

SEQ ID NO: 8140 - DNA, 22 bp, Artificial Sequence
  Description of Artificial Sequence: Synthetic oligonucleotide
atattgaatcccagggagccgg

SEQ ID NO: 8141 - DNA, 22 bp, Artificial Sequence
  Description of Artificial Sequence: Synthetic oligonucleotide
tttctcatctcaataatcctgt

SEQ ID NO: 8142 - DNA, 22 bp, Artificial Sequence
  Description of Artificial Sequence: Synthetic oligonucleotide
taatattgaatcccagggagcc

SEQ ID NO: 8143 - DNA, 22 bp, Artificial Sequence
  Description of Artificial Sequence: Synthetic oligonucleotide
tcaaatacagttcaaataagcc

SEQ ID NO: 8144 - DNA, 22 bp, Artificial Sequence
  Description of Artificial Sequence: Synthetic oligonucleotide
atttaactgttctcagttccag

SEQ ID NO: 8145 - DNA, 22 bp, Artificial Sequence
  Description of Artificial Sequence: Synthetic oligonucleotide
ttcccttatcaggaagggtggc

SEQ ID NO: 8146 - DNA, 22 bp, Artificial Sequence
  Description of Artificial Sequence: Synthetic oligonucleotide
tttgtgtgtgagcgtgtggcgg

SEQ ID NO: 8147 - DNA, 22 bp, Artificial Sequence
  Description of Artificial Sequence: Synthetic oligonucleotide
atatctcaatttctagtgtcct

SEQ ID NO: 8148 - DNA, 22 bp, Artificial Sequence
  Description of Artificial Sequence: Synthetic oligonucleotide
ttacaaagtcgaagtgccctgg

SEQ ID NO: 8149 - DNA, 22 bp, Artificial Sequence
  Description of Artificial Sequence: Synthetic oligonucleotide
gatgacgatgccatcaatggcg

SEQ ID NO: 8150 - DNA, 22 bp, Artificial Sequence
  Description of Artificial Sequence: Synthetic oligonucleotide
atttcccatcgctgagtgggtc

SEQ ID NO: 8151 - DNA, 22 bp, Artificial Sequence
  Description of Artificial Sequence: Synthetic oligonucleotide
atatcacacgtcttgggcaggt

SEQ ID NO: 8152 - DNA, 22 bp, Artificial Sequence
  Description of Artificial Sequence: Synthetic oligonucleotide
attcatttcccatcgctgagtg

SEQ ID NO: 8153 - DNA, 22 bp, Artificial Sequence
  Description of Artificial Sequence: Synthetic oligonucleotide
attatggagtttatcgtaagga

SEQ ID NO: 8154 - DNA, 22 bp, Artificial Sequence
  Description of Artificial Sequence: Synthetic oligonucleotide
ttgctcaatgtggtaatctgct

SEQ ID NO: 8155 - DNA, 22 bp, Artificial Sequence
  Description of Artificial Sequence: Synthetic oligonucleotide
caatgtggtaatctgctgagcc

SEQ ID NO: 8156 - DNA, 22 bp, Artificial Sequence
  Description of Artificial Sequence: Synthetic oligonucleotide
agatcttcacatacaagctgat

SEQ ID NO: 8157 - DNA, 22 bp, Artificial Sequence
  Description of Artificial Sequence: Synthetic oligonucleotide
tttaaacagccatgtcttggca

SEQ ID NO: 8158 - DNA, 22 bp, Artificial Sequence
  Description of Artificial Sequence: Synthetic oligonucleotide
atatcaagaaatagcctatgtt

SEQ ID NO: 8159 - DNA, 22 bp, Artificial Sequence
  Description of Artificial Sequence: Synthetic oligonucleotide
tttagaagagatatcagcatgc

SEQ ID NO: 8160 - DNA, 22 bp, Artificial Sequence
  Description of Artificial Sequence: Synthetic oligonucleotide
catactcaatacagtgttctgg

SEQ ID NO: 8161 - DNA, 22 bp, Artificial Sequence
  Description of Artificial Sequence: Synthetic oligonucleotide
ttgtcgatagaaagtgtcgtta

SEQ ID NO: 8162 - DNA, 22 bp, Artificial Sequence
  Description of Artificial Sequence: Synthetic oligonucleotide
attattcaagggaatgtatgca

SEQ ID NO: 8163 - DNA, 22 bp, Artificial Sequence
  Description of Artificial Sequence: Synthetic oligonucleotide
ttctcataggagtccaggtggc

SEQ ID NO: 8164 - DNA, 22 bp, Artificial Sequence
  Description of Artificial Sequence: Synthetic oligonucleotide
agatgtaataggctcttctggg

SEQ ID NO: 8165 - DNA, 22 bp, Artificial Sequence
  Description of Artificial Sequence: Synthetic oligonucleotide
ataggagtccaggtggccgttg

SEQ ID NO: 8166 - DNA, 22 bp, Artificial Sequence
  Description of Artificial Sequence: Synthetic oligonucleotide
cttccttaggactttcatggca

SEQ ID NO: 8167 - DNA, 22 bp, Artificial Sequence
  Description of Artificial Sequence: Synthetic oligonucleotide
gtattctaccagggagccttcc

SEQ ID NO: 8168 - DNA, 22 bp, Artificial Sequence
  Description of Artificial Sequence: Synthetic oligonucleotide
ctttcacaccattgaaatagct

SEQ ID NO: 8169 - DNA, 22 bp, Artificial Sequence
  Description of Artificial Sequence: Synthetic oligonucleotide
tttctcatccactctgtaaccc

SEQ ID NO: 8170 - DNA, 22 bp, Artificial Sequence
  Description of Artificial Sequence: Synthetic oligonucleotide
ttacctaaacacatcataatat

SEQ ID NO: 8171 - DNA, 22 bp, Artificial Sequence
  Description of Artificial Sequence: Synthetic oligonucleotide
taatgttataaatgcctgatgg

SEQ ID NO: 8172 - DNA, 22 bp, Artificial Sequence
  Description of Artificial Sequence: Synthetic oligonucleotide
ttcacttccagcggtactgggc

SEQ ID NO: 8173 - DNA, 22 bp, Artificial Sequence
  Description of Artificial Sequence: Synthetic oligonucleotide
acagtaatgacaatgatgtgtg

SEQ ID NO: 8174 - DNA, 22 bp, Artificial Sequence
  Description of Artificial Sequence: Synthetic oligonucleotide
ttctagtctcacttcccaaggc

SEQ ID NO: 8175 - DNA, 22 bp, Artificial Sequence
  Description of Artificial Sequence: Synthetic oligonucleotide
atttccagtgaagtacacagcc

SEQ ID NO: 8176 - DNA, 22 bp, Artificial Sequence
  Description of Artificial Sequence: Synthetic oligonucleotide
ttattcgttgctcgtagtgcct

SEQ ID NO: 8177 - DNA, 22 bp, Artificial Sequence
  Description of Artificial Sequence: Synthetic oligonucleotide
tttgcacatgatctcggccgcc

SEQ ID NO: 8178 - DNA, 22 bp, Artificial Sequence
  Description of Artificial Sequence: Synthetic oligonucleotide
tttaaagtcaaaggcacagcct

SEQ ID NO: 8179 - DNA, 22 bp, Artificial Sequence
  Description of Artificial Sequence: Synthetic oligonucleotide
taaatgatgccgagcttgtgca

SEQ ID NO: 8180 - DNA, 22 bp, Artificial Sequence
  Description of Artificial Sequence: Synthetic oligonucleotide
ttcttgcttgagtttatgtggc

SEQ ID NO: 8181 - DNA, 22 bp, Artificial Sequence
  Description of Artificial Sequence: Synthetic oligonucleotide
tttactattaaccaaagagttg

SEQ ID NO: 8182 - DNA, 22 bp, Artificial Sequence
  Description of Artificial Sequence: Synthetic oligonucleotide
aatgctaaggatctttaagtgt

SEQ ID NO: 8183 - DNA, 22 bp, Artificial Sequence
  Description of Artificial Sequence: Synthetic oligonucleotide
taataatcaccggcagtagcgg

SEQ ID NO: 8184 - DNA, 22 bp, Artificial Sequence
  Description of Artificial Sequence: Synthetic oligonucleotide
ttatatggcattaatgacttcc

SEQ ID NO: 8185 - DNA, 22 bp, Artificial Sequence
  Description of Artificial Sequence: Synthetic oligonucleotide
tttaggatgaagaatacggtct

SEQ ID NO: 8186 - DNA, 22 bp, Artificial Sequence
  Description of Artificial Sequence: Synthetic oligonucleotide
aatttaggatgaagaatacggt

SEQ ID NO: 8187 - DNA, 22 bp, Artificial Sequence
  Description of Artificial Sequence: Synthetic oligonucleotide
aattggacaagtccagtgaggc

SEQ ID NO: 8188 - DNA, 22 bp, Artificial Sequence
  Description of Artificial Sequence: Synthetic oligonucleotide
ttcttgcaccaaatattaaggc

SEQ ID NO: 8189 - DNA, 22 bp, Artificial Sequence
  Description of Artificial Sequence: Synthetic oligonucleotide
atttgacctcagaatgacggtg

SEQ ID NO: 8190 - DNA, 22 bp, Artificial Sequence
  Description of Artificial Sequence: Synthetic oligonucleotide
atagtctttgctaggcggcggg

SEQ ID NO: 8191 - DNA, 22 bp, Artificial Sequence
  Description of Artificial Sequence: Synthetic oligonucleotide
gtaactggtaatagtctttgct

SEQ ID NO: 8192 - DNA, 22 bp, Artificial Sequence
  Description of Artificial Sequence: Synthetic oligonucleotide
ttcttgtgaggacttaattccc

SEQ ID NO: 8193 - DNA, 22 bp, Artificial Sequence
  Description of Artificial Sequence: Synthetic oligonucleotide
atttccattcattccaacacca

SEQ ID NO: 8194 - DNA, 22 bp, Artificial Sequence
  Description of Artificial Sequence: Synthetic oligonucleotide
aacctctaccaagatatcacgt

SEQ ID NO: 8195 - DNA, 22 bp, Artificial Sequence
  Description of Artificial Sequence: Synthetic oligonucleotide
tttatcaataatcttcactgca

SEQ ID NO: 8196 - DNA, 22 bp, Artificial Sequence
  Description of Artificial Sequence: Synthetic oligonucleotide
ataatcttcactgcaaactcca

SEQ ID NO: 8197 - DNA, 22 bp, Artificial Sequence
  Description of Artificial Sequence: Synthetic oligonucleotide
ttctcctttcccaatctctcgt

SEQ ID NO: 8198 - DNA, 22 bp, Artificial Sequence
  Description of Artificial Sequence: Synthetic oligonucleotide
atctcataggctttgagctgca

SEQ ID NO: 8199 - DNA, 22 bp, Artificial Sequence
  Description of Artificial Sequence: Synthetic oligonucleotide
atgacattgaggactttctccc

SEQ ID NO: 8200 - DNA, 22 bp, Artificial Sequence
  Description of Artificial Sequence: Synthetic oligonucleotide
ttctgtttccaaatcatcaggt

SEQ ID NO: 8201 - DNA, 22 bp, Artificial Sequence
  Description of Artificial Sequence: Synthetic oligonucleotide
tttaatgtagaactgctggcca

SEQ ID NO: 8202 - DNA, 22 bp, Artificial Sequence
  Description of Artificial Sequence: Synthetic oligonucleotide
taatctgcgaagtatttctcgc

SEQ ID NO: 8203 - DNA, 22 bp, Artificial Sequence
  Description of Artificial Sequence: Synthetic oligonucleotide
ataaataattgctgtatttccc

SEQ ID NO: 8204 - DNA, 22 bp, Artificial Sequence
  Description of Artificial Sequence: Synthetic oligonucleotide
tttctcacacaggtatacacgt

SEQ ID NO: 8205 - DNA, 22 bp, Artificial Sequence
  Description of Artificial Sequence: Synthetic oligonucleotide
cttctgtatcaggaagttctgt

SEQ ID NO: 8206 - DNA, 22 bp, Artificial Sequence
  Description of Artificial Sequence: Synthetic oligonucleotide
ttattactgaacaggaacagct

SEQ ID NO: 8207 - DNA, 22 bp, Artificial Sequence
  Description of Artificial Sequence: Synthetic oligonucleotide
aatcctatttacaaagtatgct

SEQ ID NO: 8208 - DNA, 22 bp, Artificial Sequence
  Description of Artificial Sequence: Synthetic oligonucleotide
ttacttaaagttgcactgtccc

SEQ ID NO: 8209 - DNA, 22 bp, Artificial Sequence
  Description of Artificial Sequence: Synthetic oligonucleotide
ttctgatatccatctgtcccgt

SEQ ID NO: 8210 - DNA, 22 bp, Artificial Sequence
  Description of Artificial Sequence: Synthetic oligonucleotide
attccaattccacaaaggacgt

SEQ ID NO: 8211 - DNA, 22 bp, Artificial Sequence
  Description of Artificial Sequence: Synthetic oligonucleotide
ttaacttgccagatattcacca

SEQ ID NO: 8212 - DNA, 22 bp, Artificial Sequence
  Description of Artificial Sequence: Synthetic oligonucleotide
tattgtaacccacttctgcggt

SEQ ID NO: 8213 - DNA, 22 bp, Artificial Sequence
  Description of Artificial Sequence: Synthetic oligonucleotide
tttatagatcatggcttgcgct

SEQ ID NO: 8214 - DNA, 22 bp, Artificial Sequence
  Description of Artificial Sequence: Synthetic oligonucleotide
attccttcttctctgatgaccg

SEQ ID NO: 8215 - DNA, 22 bp, Artificial Sequence
  Description of Artificial Sequence: Synthetic oligonucleotide
cttatctctcagtttgggcggc

SEQ ID NO: 8216 - DNA, 22 bp, Artificial Sequence
  Description of Artificial Sequence: Synthetic oligonucleotide
ttaaataccgtgtttcccagga

SEQ ID NO: 8217 - DNA, 22 bp, Artificial Sequence
  Description of Artificial Sequence: Synthetic oligonucleotide
ttaagtaataacttgtccacct

SEQ ID NO: 8218 - DNA, 22 bp, Artificial Sequence
  Description of Artificial Sequence: Synthetic oligonucleotide
ctcatctttcagattgtagcct

SEQ ID NO: 8219 - DNA, 22 bp, Artificial Sequence
  Description of Artificial Sequence: Synthetic oligonucleotide
atataggttatttgtagccgcc

SEQ ID NO: 8220 - DNA, 22 bp, Artificial Sequence
  Description of Artificial Sequence: Synthetic oligonucleotide
tttagtgtaagaagtatcactc

SEQ ID NO: 8221 - DNA, 22 bp, Artificial Sequence
  Description of Artificial Sequence: Synthetic oligonucleotide
ttcttcaagaacactacgtggg

SEQ ID NO: 8222 - DNA, 22 bp, Artificial Sequence
  Description of Artificial Sequence: Synthetic oligonucleotide
tactgtgaagagagcaacacgt

SEQ ID NO: 8223 - DNA, 22 bp, Artificial Sequence
  Description of Artificial Sequence: Synthetic oligonucleotide
ttaattcctgagctgagaccgt

SEQ ID NO: 8224 - DNA, 22 bp, Artificial Sequence
  Description of Artificial Sequence: Synthetic oligonucleotide
atcttgacacggatagttccag

SEQ ID NO: 8225 - DNA, 22 bp, Artificial Sequence
  Description of Artificial Sequence: Synthetic oligonucleotide
gttgtctatgtcatagattcca

SEQ ID NO: 8226 - DNA, 22 bp, Artificial Sequence
  Description of Artificial Sequence: Synthetic oligonucleotide
gtttattacaactaattggcga

SEQ ID NO: 8227 - DNA, 22 bp, Artificial Sequence
  Description of Artificial Sequence: Synthetic oligonucleotide
tttacctcttaaatcaactggg

SEQ ID NO: 8228 - DNA, 22 bp, Artificial Sequence
  Description of Artificial Sequence: Synthetic oligonucleotide
ttctgtaaacatatcaggtgcc

SEQ ID NO: 8229 - DNA, 22 bp, Artificial Sequence
  Description of Artificial Sequence: Synthetic oligonucleotide
tatctataccatagtcatagct

SEQ ID NO: 8230 - DNA, 22 bp, Artificial Sequence
  Description of Artificial Sequence: Synthetic oligonucleotide
ttaactcattatcaagttcggc

SEQ ID NO: 8231 - DNA, 22 bp, Artificial Sequence
  Description of Artificial Sequence: Synthetic oligonucleotide
attgaaattaacatcagctgca

SEQ ID NO: 8232 - DNA, 22 bp, Artificial Sequence
  Description of Artificial Sequence: Synthetic oligonucleotide
aatttaacagggaaacactcca

SEQ ID NO: 8233 - DNA, 22 bp, Artificial Sequence
  Description of Artificial Sequence: Synthetic oligonucleotide
atcattcaaggctttacctgca

SEQ ID NO: 8234 - DNA, 22 bp, Artificial Sequence
  Description of Artificial Sequence: Synthetic oligonucleotide
tatacaaagctttctgaaggca

SEQ ID NO: 8235 - DNA, 22 bp, Artificial Sequence
  Description of Artificial Sequence: Synthetic oligonucleotide
tttaacttccatgatattggag

SEQ ID NO: 8236 - DNA, 22 bp, Artificial Sequence
  Description of Artificial Sequence: Synthetic oligonucleotide
aacttccatgatattggaggcc

SEQ ID NO: 8237 - DNA, 22 bp, Artificial Sequence
  Description of Artificial Sequence: Synthetic oligonucleotide
gttaagccgcaggccagggcgg

SEQ ID NO: 8238 - DNA, 22 bp, Artificial Sequence
  Description of Artificial Sequence: Synthetic oligonucleotide
attattggacagtctttgtggg

SEQ ID NO: 8239 - DNA, 22 bp, Artificial Sequence
  Description of Artificial Sequence: Synthetic oligonucleotide
gtgtctatagctctgaggccgc

SEQ ID NO: 8240 - DNA, 22 bp, Artificial Sequence
  Description of Artificial Sequence: Synthetic oligonucleotide
gttagttaatatcaattgctca

SEQ ID NO: 8241 - DNA, 22 bp, Artificial Sequence
  Description of Artificial Sequence: Synthetic oligonucleotide
ttatatagtcaaggaatgtgca

SEQ ID NO: 8242 - DNA, 22 bp, Artificial Sequence
  Description of Artificial Sequence: Synthetic oligonucleotide
tatacctaataaggtatgctgt

SEQ ID NO: 8243 - DNA, 22 bp, Artificial Sequence
  Description of Artificial Sequence: Synthetic oligonucleotide
taagaatttcagttcctgtggc

SEQ ID NO: 8244 - DNA, 22 bp, Artificial Sequence
  Description of Artificial Sequence: Synthetic oligonucleotide
aattgtaaacgaaccaatacct

SEQ ID NO: 8245 - DNA, 22 bp, Artificial Sequence
  Description of Artificial Sequence: Synthetic oligonucleotide
tttccttgaccctctttggcca

SEQ ID NO: 8246 - DNA, 22 bp, Artificial Sequence
  Description of Artificial Sequence: Synthetic oligonucleotide
taaatatatcttcaatactgct

SEQ ID NO: 8247 - DNA, 22 bp, Artificial Sequence
  Description of Artificial Sequence: Synthetic oligonucleotide
atatccaatagcagagtaggtg

SEQ ID NO: 8248 - DNA, 22 bp, Artificial Sequence
  Description of Artificial Sequence: Synthetic oligonucleotide
taaatccaccagtttatgagaa

SEQ ID NO: 8249 - DNA, 22 bp, Artificial Sequence
  Description of Artificial Sequence: Synthetic oligonucleotide
aatgtctctcagctaaagacac

SEQ ID NO: 8250 - DNA, 22 bp, Artificial Sequence
  Description of Artificial Sequence: Synthetic oligonucleotide
tatgacatggagtgaagctgcc

SEQ ID NO: 8251 - DNA, 22 bp, Artificial Sequence
  Description of Artificial Sequence: Synthetic oligonucleotide
tttgatggccacagcctgggtc

SEQ ID NO: 8252 - DNA, 22 bp, Artificial Sequence
  Description of Artificial Sequence: Synthetic oligonucleotide
ttgttgtatctcaggaactccc

SEQ ID NO: 8253 - DNA, 22 bp, Artificial Sequence
  Description of Artificial Sequence: Synthetic oligonucleotide
tttattctgcgtaaagcaccag

SEQ ID NO: 8254 - DNA, 22 bp, Artificial Sequence
  Description of Artificial Sequence: Synthetic oligonucleotide
ttacaaatggagggcatggcca

SEQ ID NO: 8255 - DNA, 22 bp, Artificial Sequence
  Description of Artificial Sequence: Synthetic oligonucleotide
ttgttcttacaaatggagggca

SEQ ID NO: 8256 - DNA, 22 bp, Artificial Sequence
  Description of Artificial Sequence: Synthetic oligonucleotide
catcgatatcaacttcaatgcc

SEQ ID NO: 8257 - DNA, 22 bp, Artificial Sequence
  Description of Artificial Sequence: Synthetic oligonucleotide
tttctctttaatgtagattcgg

SEQ ID NO: 8258 - DNA, 22 bp, Artificial Sequence
  Description of Artificial Sequence: Synthetic oligonucleotide
ttcacgtaggacatggccattg

SEQ ID NO: 8259 - DNA, 22 bp, Artificial Sequence
  Description of Artificial Sequence: Synthetic oligonucleotide
ttaaatgtagagaggaaggcca

SEQ ID NO: 8260 - DNA, 22 bp, Artificial Sequence
  Description of Artificial Sequence: Synthetic oligonucleotide
catacttctcagctttgtaggg

SEQ ID NO: 8261 - DNA, 22 bp, Artificial Sequence
  Description of Artificial Sequence: Synthetic oligonucleotide
atttgtttctaccctcacatgt

SEQ ID NO: 8262 - DNA, 22 bp, Artificial Sequence
  Description of Artificial Sequence: Synthetic oligonucleotide
ttaaactctgtctggatcctgc

SEQ ID NO: 8263 - DNA, 22 bp, Artificial Sequence
  Description of Artificial Sequence: Synthetic oligonucleotide
ctacataaacacatttgcatgc

SEQ ID NO: 8264 - DNA, 22 bp, Artificial Sequence
  Description of Artificial Sequence: Synthetic oligonucleotide
atacactgtaaccttctagcag

SEQ ID NO: 8265 - DNA, 22 bp, Artificial Sequence
  Description of Artificial Sequence: Synthetic oligonucleotide
ttatcctgaaccagtaatcgca

SEQ ID NO: 8266 - DNA, 22 bp, Artificial Sequence
  Description of Artificial Sequence: Synthetic oligonucleotide
tacagttatcactctgctgcgt

SEQ ID NO: 8267 - DNA, 22 bp, Artificial Sequence
  Description of Artificial Sequence: Synthetic oligonucleotide
aattcctctcacgcgctgggcg

SEQ ID NO: 8268 - DNA, 22 bp, Artificial Sequence
  Description of Artificial Sequence: Synthetic oligonucleotide
ttgtggttaaagacatcatctt

SEQ ID NO: 8269 - DNA, 22 bp, Artificial Sequence
  Description of Artificial Sequence: Synthetic oligonucleotide
ttgcatttgaacttccagagag

SEQ ID NO: 8270 - DNA, 22 bp, Artificial Sequence
  Description of Artificial Sequence: Synthetic oligonucleotide
tttaaacctaagggttgggcct

SEQ ID NO: 8271 - DNA, 22 bp, Artificial Sequence
  Description of Artificial Sequence: Synthetic oligonucleotide
aatttcctggacttggttgctt

SEQ ID NO: 8272 - DNA, 22 bp, Artificial Sequence
  Description of Artificial Sequence: Synthetic oligonucleotide
aagatctgtaccattatttcct

SEQ ID NO: 8273 - DNA, 22 bp, Artificial Sequence
  Description of Artificial Sequence: Synthetic oligonucleotide
ccaagtaaccaaattctatggt

SEQ ID NO: 8274 - DNA, 22 bp, Artificial Sequence
  Description of Artificial Sequence: Synthetic oligonucleotide
ttaaagttaaacttatggaggg

SEQ ID NO: 8275 - DNA, 22 bp, Artificial Sequence
  Description of Artificial Sequence: Synthetic oligonucleotide
tatatgattcatcctataagga

SEQ ID NO: 8276 - DNA, 22 bp, Artificial Sequence
  Description of Artificial Sequence: Synthetic oligonucleotide
tttgaaactactccaaattcct

SEQ ID NO: 8277 - DNA, 22 bp, Artificial Sequence
  Description of Artificial Sequence: Synthetic oligonucleotide
ttattgtgagggattgtctgga

SEQ ID NO: 8278 - DNA, 22 bp, Artificial Sequence
  Description of Artificial Sequence: Synthetic oligonucleotide
tatcttgacaagatagtacgga

SEQ ID NO: 8279 - DNA, 22 bp, Artificial Sequence
  Description of Artificial Sequence: Synthetic oligonucleotide
atcaggaaacaaatagaagcct

SEQ ID NO: 8280 - DNA, 22 bp, Artificial Sequence
  Description of Artificial Sequence: Synthetic oligonucleotide
tttatcttcctgaaacttggag

SEQ ID NO: 8281 - DNA, 22 bp, Artificial Sequence
  Description of Artificial Sequence: Synthetic oligonucleotide
tacgtatctgacatcatcagag

SEQ ID NO: 8282 - DNA, 22 bp, Artificial Sequence
  Description of Artificial Sequence: Synthetic oligonucleotide
atagcatctgtcattccgatcc

SEQ ID NO: 8283 - DNA, 22 bp, Artificial Sequence
  Description of Artificial Sequence: Synthetic oligonucleotide
tgagattaacaaactatggccc

SEQ ID NO: 8284 - DNA, 22 bp, Artificial Sequence
  Description of Artificial Sequence: Synthetic oligonucleotide
tattctatgcatattctttccg

SEQ ID NO: 8285 - DNA, 22 bp, Artificial Sequence
  Description of Artificial Sequence: Synthetic oligonucleotide
atttgtatacaatatcttggag

SEQ ID NO: 8286 - DNA, 22 bp, Artificial Sequence
  Description of Artificial Sequence: Synthetic oligonucleotide
ttgtacaacaagcataatgcca

SEQ ID NO: 8287 - DNA, 22 bp, Artificial Sequence
  Description of Artificial Sequence: Synthetic oligonucleotide
atgcttaataatttacatcgtg

SEQ ID NO: 8288 - DNA, 22 bp, Artificial Sequence
  Description of Artificial Sequence: Synthetic oligonucleotide
atttacatcgtgatccgtgccc

SEQ ID NO: 8289 - DNA, 22 bp, Artificial Sequence
  Description of Artificial Sequence: Synthetic oligonucleotide
atatggagaggcgtgtctccgt

SEQ ID NO: 8290 - DNA, 22 bp, Artificial Sequence
  Description of Artificial Sequence: Synthetic oligonucleotide
tattcaaacacaagtgtcagcg

SEQ ID NO: 8291 - DNA, 22 bp, Artificial Sequence
  Description of Artificial Sequence: Synthetic oligonucleotide
tttccataggaatttgtgtgta

SEQ ID NO: 8292 - DNA, 22 bp, Artificial Sequence
  Description of Artificial Sequence: Synthetic oligonucleotide
ttatcctcaggaattgtgtcca

SEQ ID NO: 8293 - DNA, 22 bp, Artificial Sequence
  Description of Artificial Sequence: Synthetic oligonucleotide
gattcccttcatattattggcc

SEQ ID NO: 8294 - DNA, 22 bp, Artificial Sequence
  Description of Artificial Sequence: Synthetic oligonucleotide
tacactacggctattgagtgca

SEQ ID NO: 8295 - DNA, 22 bp, Artificial Sequence
  Description of Artificial Sequence: Synthetic oligonucleotide
tatagaggtcagattcatccag

SEQ ID NO: 8296 - DNA, 22 bp, Artificial Sequence
  Description of Artificial Sequence: Synthetic oligonucleotide
atacactcacagagtaccgggc

SEQ ID NO: 8297 - DNA, 22 bp, Artificial Sequence
  Description of Artificial Sequence: Synthetic oligonucleotide
attccgtttccagttctttgcg

SEQ ID NO: 8298 - DNA, 22 bp, Artificial Sequence
  Description of Artificial Sequence: Synthetic oligonucleotide
atttctacaggcttccagagat

SEQ ID NO: 8299 - DNA, 22 bp, Artificial Sequence
  Description of Artificial Sequence: Synthetic oligonucleotide
cttatctctggcatagagccca

SEQ ID NO: 8300 - DNA, 22 bp, Artificial Sequence
  Description of Artificial Sequence: Synthetic oligonucleotide
tttaaatatgacacatccttgt

SEQ ID NO: 8301 - DNA, 22 bp, Artificial Sequence
  Description of Artificial Sequence: Synthetic oligonucleotide
ttagtttacttcacacagccag

SEQ ID NO: 8302 - DNA, 22 bp, Artificial Sequence
  Description of Artificial Sequence: Synthetic oligonucleotide
tttgatgtccagcatagaggag

SEQ ID NO: 8303 - DNA, 22 bp, Artificial Sequence
  Description of Artificial Sequence: Synthetic oligonucleotide
gtatcaaagcatcattcctgct

SEQ ID NO: 8304 - DNA, 22 bp, Artificial Sequence
  Description of Artificial Sequence: Synthetic oligonucleotide
atatatgtaaatatgactggtc

SEQ ID NO: 8305 - DNA, 22 bp, Artificial Sequence
  Description of Artificial Sequence: Synthetic oligonucleotide
attcatggagatgttgactgct

SEQ ID NO: 8306 - DNA, 22 bp, Artificial Sequence
  Description of Artificial Sequence: Synthetic oligonucleotide
ttatctaagcatttcattgcat

SEQ ID NO: 8307 - DNA, 22 bp, Artificial Sequence
  Description of Artificial Sequence: Synthetic oligonucleotide
caatgaaaggacagtctcctgt

SEQ ID NO: 8308 - DNA, 22 bp, Artificial Sequence
  Description of Artificial Sequence: Synthetic oligonucleotide
atacacttggatagtacgtgtc

SEQ ID NO: 8309 - DNA, 22 bp, Artificial Sequence
  Description of Artificial Sequence: Synthetic oligonucleotide
aatagttaacagataaacaggt

SEQ ID NO: 8310 - DNA, 22 bp, Artificial Sequence
  Description of Artificial Sequence: Synthetic oligonucleotide
attacattagacaatttaggcc

SEQ ID NO: 8311 - DNA, 22 bp, Artificial Sequence
  Description of Artificial Sequence: Synthetic oligonucleotide
tttcatcagggtgaagttcctc

SEQ ID NO: 8312 - DNA, 22 bp, Artificial Sequence
  Description of Artificial Sequence: Synthetic oligonucleotide
ttgacttgagatcttagctgcc

SEQ ID NO: 8313 - DNA, 22 bp, Artificial Sequence
  Description of Artificial Sequence: Synthetic oligonucleotide
cagaacaggtagataatatcct

SEQ ID NO: 8314 - DNA, 22 bp, Artificial Sequence
  Description of Artificial Sequence: Synthetic oligonucleotide
ttgagtttcctgattcagttcc

SEQ ID NO: 8315 - DNA, 22 bp, Artificial Sequence
  Description of Artificial Sequence: Synthetic oligonucleotide
ttgtagtgaaattctttctcca

SEQ ID NO: 8316 - DNA, 22 bp, Artificial Sequence
  Description of Artificial Sequence: Synthetic oligonucleotide
atagcacaagaaacacttacca

SEQ ID NO: 8317 - DNA, 22 bp, Artificial Sequence
  Description of Artificial Sequence: Synthetic oligonucleotide
tactttgggcaaatggacagct

SEQ ID NO: 8318 - DNA, 22 bp, Artificial Sequence
  Description of Artificial Sequence: Synthetic oligonucleotide
atatacaggagaatgaggtcgt

SEQ ID NO: 8319 - DNA, 22 bp, Artificial Sequence
  Description of Artificial Sequence: Synthetic oligonucleotide
ataaagtacaagtttaggtgat

SEQ ID NO: 8320 - DNA, 22 bp, Artificial Sequence
  Description of Artificial Sequence: Synthetic oligonucleotide
attaaataagacattcgcccag

SEQ ID NO: 8321 - DNA, 22 bp, Artificial Sequence
  Description of Artificial Sequence: Synthetic oligonucleotide
taattaaataagacattcgccc

SEQ ID NO: 8322 - DNA, 22 bp, Artificial Sequence
  Description of Artificial Sequence: Synthetic oligonucleotide
ttaaggacagggtttgtcccgg

SEQ ID NO: 8323 - DNA, 22 bp, Artificial Sequence
  Description of Artificial Sequence: Synthetic oligonucleotide
atatctgttcgctccatttccc

SEQ ID NO: 8324 - DNA, 22 bp, Artificial Sequence
  Description of Artificial Sequence: Synthetic oligonucleotide
tattaaggacagggtttgtccc

SEQ ID NO: 8325 - DNA, 22 bp, Artificial Sequence
  Description of Artificial Sequence: Synthetic oligonucleotide
aattgagaaggtattgtaggca

SEQ ID NO: 8326 - DNA, 22 bp, Artificial Sequence
  Description of Artificial Sequence: Synthetic oligonucleotide
ataatagactcattgagctgct

SEQ ID NO: 8327 - DNA, 22 bp, Artificial Sequence
  Description of Artificial Sequence: Synthetic oligonucleotide
tttcatatatagtacataggcc

SEQ ID NO: 8328 - DNA, 22 bp, Artificial Sequence
  Description of Artificial Sequence: Synthetic oligonucleotide
ttgtcctttaatcttaaatggc

SEQ ID NO: 8329 - DNA, 22 bp, Artificial Sequence
  Description of Artificial Sequence: Synthetic oligonucleotide
ttacaataggctgtgtagtggc

SEQ ID NO: 8330 - DNA, 22 bp, Artificial Sequence
  Description of Artificial Sequence: Synthetic oligonucleotide
ataatcagccaaatgtggagcg

SEQ ID NO: 8331 - DNA, 22 bp, Artificial Sequence
  Description of Artificial Sequence: Synthetic oligonucleotide
atatctcttccgattatcagct

SEQ ID NO: 8332 - DNA, 22 bp, Artificial Sequence
  Description of Artificial Sequence: Synthetic oligonucleotide
tttactgattatctagacccat

SEQ ID NO: 8333 - DNA, 22 bp, Artificial Sequence
  Description of Artificial Sequence: Synthetic oligonucleotide
atttaaataaacacaacaggaa

SEQ ID NO: 8334 - DNA, 22 bp, Artificial Sequence
  Description of Artificial Sequence: Synthetic oligonucleotide
ttagataaacacgtaagtactc

SEQ ID NO: 8335 - DNA, 22 bp, Artificial Sequence
  Description of Artificial Sequence: Synthetic oligonucleotide
tttataatggttatcatggttg

SEQ ID NO: 8336 - DNA, 22 bp, Artificial Sequence
  Description of Artificial Sequence: Synthetic oligonucleotide
ttatagatccacactgtgtcaa

SEQ ID NO: 8337 - DNA, 22 bp, Artificial Sequence
  Description of Artificial Sequence: Synthetic oligonucleotide
aacatgtaacaccatagctctc

SEQ ID NO: 8338 - DNA, 22 bp, Artificial Sequence
  Description of Artificial Sequence: Synthetic oligonucleotide
tttaaatggatgcttaacagca

SEQ ID NO: 8339 - DNA, 22 bp, Artificial Sequence
  Description of Artificial Sequence: Synthetic oligonucleotide
ggaagatttgatatacaaggca

SEQ ID NO: 8340 - DNA, 22 bp, Artificial Sequence
  Description of Artificial Sequence: Synthetic oligonucleotide
ataagcaaccagagcttgtcaa

SEQ ID NO: 8341 - DNA, 22 bp, Artificial Sequence
  Description of Artificial Sequence: Synthetic oligonucleotide
atttctgttgcaatactcgcat

SEQ ID NO: 8342 - DNA, 22 bp, Artificial Sequence
  Description of Artificial Sequence: Synthetic oligonucleotide
taatccattcatcttgtttcct

SEQ ID NO: 8343 - DNA, 22 bp, Artificial Sequence
  Description of Artificial Sequence: Synthetic oligonucleotide
ataacctttaccattgactgtg

SEQ ID NO: 8344 - DNA, 22 bp, Artificial Sequence
  Description of Artificial Sequence: Synthetic oligonucleotide
tttaccattgactgtgctgcag

SEQ ID NO: 8345 - DNA, 22 bp, Artificial Sequence
  Description of Artificial Sequence: Synthetic oligonucleotide
tttctgaatggttcaggaagag

SEQ ID NO: 8346 - DNA, 22 bp, Artificial Sequence
  Description of Artificial Sequence: Synthetic oligonucleotide
ttatcaaagcttaagatcccag

SEQ ID NO: 8347 - DNA, 22 bp, Artificial Sequence
  Description of Artificial Sequence: Synthetic oligonucleotide
atcatttaaggtgtatactcca

SEQ ID NO: 8348 - DNA, 22 bp, Artificial Sequence
  Description of Artificial Sequence: Synthetic oligonucleotide
tttatcattctcattactagct

SEQ ID NO: 8349 - DNA, 22 bp, Artificial Sequence
  Description of Artificial Sequence: Synthetic oligonucleotide
ttgatctccaagaataactgca

SEQ ID NO: 8350 - DNA, 22 bp, Artificial Sequence
  Description of Artificial Sequence: Synthetic oligonucleotide
taaatactgatctaacaacgcc

SEQ ID NO: 8351 - DNA, 22 bp, Artificial Sequence
  Description of Artificial Sequence: Synthetic oligonucleotide
ttgatcctacagatttccacat

SEQ ID NO: 8352 - DNA, 22 bp, Artificial Sequence
  Description of Artificial Sequence: Synthetic oligonucleotide
ttaatgaaatactctgtcctga

SEQ ID NO: 8353 - DNA, 22 bp, Artificial Sequence
  Description of Artificial Sequence: Synthetic oligonucleotide
ttctacttcgtaaccatcagct

SEQ ID NO: 8354 - DNA, 22 bp, Artificial Sequence
  Description of Artificial Sequence: Synthetic oligonucleotide
tttattccagagctcctgggcc

SEQ ID NO: 8355 - DNA, 22 bp, Artificial Sequence
  Description of Artificial Sequence: Synthetic oligonucleotide
ttattacagcaaatactttggt

SEQ ID NO: 8356 - DNA, 22 bp, Artificial Sequence
  Description of Artificial Sequence: Synthetic oligonucleotide
aatcttgaactctatatcaggt

SEQ ID NO: 8357 - DNA, 22 bp, Artificial Sequence
  Description of Artificial Sequence: Synthetic oligonucleotide
cagtttaagcacagactcctga

SEQ ID NO: 8358 - DNA, 22 bp, Artificial Sequence
  Description of Artificial Sequence: Synthetic oligonucleotide
tatagaaaccatcaagagactg

SEQ ID NO: 8359 - DNA, 22 bp, Artificial Sequence
  Description of Artificial Sequence: Synthetic oligonucleotide
attctgtatggcactcactgat

SEQ ID NO: 8360 - DNA, 22 bp, Artificial Sequence
  Description of Artificial Sequence: Synthetic oligonucleotide
ttcaggaatggctccaggacac

SEQ ID NO: 8361 - DNA, 22 bp, Artificial Sequence
  Description of Artificial Sequence: Synthetic oligonucleotide
tactctgccaagatcaactcaa

SEQ ID NO: 8362 - DNA, 22 bp, Artificial Sequence
  Description of Artificial Sequence: Synthetic oligonucleotide
tgatccttggacagtatctcat

SEQ ID NO: 8363 - DNA, 22 bp, Artificial Sequence
  Description of Artificial Sequence: Synthetic oligonucleotide
ttccagattcacatttccaggt

SEQ ID NO: 8364 - DNA, 22 bp, Artificial Sequence
  Description of Artificial Sequence: Synthetic oligonucleotide
ttgatgacacaggtaatattcc

SEQ ID NO: 8365 - DNA, 22 bp, Artificial Sequence
  Description of Artificial Sequence: Synthetic oligonucleotide
tttacctgtgccaggtggacca

SEQ ID NO: 8366 - DNA, 22 bp, Artificial Sequence
  Description of Artificial Sequence: Synthetic oligonucleotide
ttaaagtggtagcctgtggctt

SEQ ID NO: 8367 - DNA, 22 bp, Artificial Sequence
  Description of Artificial Sequence: Synthetic oligonucleotide
ttagaatgcaggattccctgga

SEQ ID NO: 8368 - DNA, 22 bp, Artificial Sequence
  Description of Artificial Sequence: Synthetic oligonucleotide
ttcagttaacaagcattcagcc

SEQ ID NO: 8369 - DNA, 22 bp, Artificial Sequence
  Description of Artificial Sequence: Synthetic oligonucleotide
atattccaggagagtaccactc

SEQ ID NO: 8370 - DNA, 22 bp, Artificial Sequence
  Description of Artificial Sequence: Synthetic oligonucleotide
gtaacaatcaatttaattaggc

SEQ ID NO: 8371 - DNA, 22 bp, Artificial Sequence
  Description of Artificial Sequence: Synthetic oligonucleotide
ttatagtggtatccagaggctc

SEQ ID NO: 8372 - DNA, 22 bp, Artificial Sequence
  Description of Artificial Sequence: Synthetic oligonucleotide
tattggctagaaactggcactg

SEQ ID NO: 8373 - DNA, 22 bp, Artificial Sequence
  Description of Artificial Sequence: Synthetic oligonucleotide
tgatcagacaagtctattggct

SEQ ID NO: 8374 - DNA, 22 bp, Artificial Sequence
  Description of Artificial Sequence: Synthetic oligonucleotide
agaacatgtcagattccaagtg

SEQ ID NO: 8375 - DNA, 22 bp, Artificial Sequence
  Description of Artificial Sequence: Synthetic oligonucleotide
tttcctcttgaggcaacagggc

SEQ ID NO: 8376 - DNA, 22 bp, Artificial Sequence
  Description of Artificial Sequence: Synthetic oligonucleotide
ttattccaatccacattgcgga

SEQ ID NO: 8377 - DNA, 22 bp, Artificial Sequence
  Description of Artificial Sequence: Synthetic oligonucleotide
tattggaatgggatcagcacgg

SEQ ID NO: 8378 - DNA, 22 bp, Artificial Sequence
  Description of Artificial Sequence: Synthetic oligonucleotide
ttaatggtgtggacaaagaggc

SEQ ID NO: 8379 - DNA, 22 bp, Artificial Sequence
  Description of Artificial Sequence: Synthetic oligonucleotide
aatgtttgccatagtaacagat

SEQ ID NO: 8380 - DNA, 22 bp, Artificial Sequence
  Description of Artificial Sequence: Synthetic oligonucleotide
ttaacttcccagtagctactgc

SEQ ID NO: 8381 - DNA, 22 bp, Artificial Sequence
  Description of Artificial Sequence: Synthetic oligonucleotide
ttaaagcacaggagtgccatgt

SEQ ID NO: 8382 - DNA, 22 bp, Artificial Sequence
  Description of Artificial Sequence: Synthetic oligonucleotide
tggacatatcccagtctcagtg

SEQ ID NO: 8383 - DNA, 22 bp, Artificial Sequence
  Description of Artificial Sequence: Synthetic oligonucleotide
gtaagatacaatattaggatga

SEQ ID NO: 8384 - DNA, 22 bp, Artificial Sequence
  Description of Artificial Sequence: Synthetic oligonucleotide
aataatatccagaacagaacct

SEQ ID NO: 8385 - DNA, 22 bp, Artificial Sequence
  Description of Artificial Sequence: Synthetic oligonucleotide
tttgatattgattctttcactc

SEQ ID NO: 8386 - DNA, 22 bp, Artificial Sequence
  Description of Artificial Sequence: Synthetic oligonucleotide
ttcacaaatagcattggcacat

SEQ ID NO: 8387 - DNA, 22 bp, Artificial Sequence
  Description of Artificial Sequence: Synthetic oligonucleotide
tatactgaacatgtacagcgga

SEQ ID NO: 8388 - DNA, 22 bp, Artificial Sequence
  Description of Artificial Sequence: Synthetic oligonucleotide
attcaccatgaagttaattcca

SEQ ID NO: 8389 - DNA, 22 bp, Artificial Sequence
  Description of Artificial Sequence: Synthetic oligonucleotide
aagaagaaacccatagctgcct

SEQ ID NO: 8390 - DNA, 22 bp, Artificial Sequence
  Description of Artificial Sequence: Synthetic oligonucleotide
atacttcttgtcattgcaagcc

SEQ ID NO: 8391 - DNA, 22 bp, Artificial Sequence
  Description of Artificial Sequence: Synthetic oligonucleotide
aatagtacccatgtccataggc

SEQ ID NO: 8392 - DNA, 22 bp, Artificial Sequence
  Description of Artificial Sequence: Synthetic oligonucleotide
ttaatggtgtagggcttccggg

SEQ ID NO: 8393 - DNA, 22 bp, Artificial Sequence
  Description of Artificial Sequence: Synthetic oligonucleotide
ttattcctcaccaggatgctca

SEQ ID NO: 8394 - DNA, 22 bp, Artificial Sequence
  Description of Artificial Sequence: Synthetic oligonucleotide
gttgtagatgatattgccgtgt

SEQ ID NO: 8395 - DNA, 22 bp, Artificial Sequence
  Description of Artificial Sequence: Synthetic oligonucleotide
ttcattgtagacttcctgtgga

SEQ ID NO: 8396 - DNA, 22 bp, Artificial Sequence
  Description of Artificial Sequence: Synthetic oligonucleotide
taataaactggtaataccggtg

SEQ ID NO: 8397 - DNA, 22 bp, Artificial Sequence
  Description of Artificial Sequence: Synthetic oligonucleotide
ttgctttacaggagtctgtccc

SEQ ID NO: 8398 - DNA, 22 bp, Artificial Sequence
  Description of Artificial Sequence: Synthetic oligonucleotide
ttgacctatggcactgactgga

SEQ ID NO: 8399 - DNA, 22 bp, Artificial Sequence
  Description of Artificial Sequence: Synthetic oligonucleotide
atttacagacacatactgccgg

SEQ ID NO: 8400 - DNA, 22 bp, Artificial Sequence
  Description of Artificial Sequence: Synthetic oligonucleotide
tttcattaacatttgagatggc

SEQ ID NO: 8401 - DNA, 22 bp, Artificial Sequence
  Description of Artificial Sequence: Synthetic oligonucleotide
tttcttcagctgtcaatactgt

SEQ ID NO: 8402 - DNA, 22 bp, Artificial Sequence
  Description of Artificial Sequence: Synthetic oligonucleotide
tacattcacaaagttctctgcg

SEQ ID NO: 8403 - DNA, 22 bp, Artificial Sequence
  Description of Artificial Sequence: Synthetic oligonucleotide
atcataatccaggttgactcca

SEQ ID NO: 8404 - DNA, 22 bp, Artificial Sequence
  Description of Artificial Sequence: Synthetic oligonucleotide
atattctccagcctggtgtggc

SEQ ID NO: 8405 - DNA, 22 bp, Artificial Sequence
  Description of Artificial Sequence: Synthetic oligonucleotide
tttcctagtgagacctttggtt

SEQ ID NO: 8406 - DNA, 22 bp, Artificial Sequence
  Description of Artificial Sequence: Synthetic oligonucleotide
gagaataatctgggaaagggcc

SEQ ID NO: 8407 - DNA, 22 bp, Artificial Sequence
  Description of Artificial Sequence: Synthetic oligonucleotide
atttcttctggctatctgactt

SEQ ID NO: 8408 - DNA, 22 bp, Artificial Sequence
  Description of Artificial Sequence: Synthetic oligonucleotide
ataaccttcccggaagaaagag

SEQ ID NO: 8409 - DNA, 22 bp, Artificial Sequence
  Description of Artificial Sequence: Synthetic oligonucleotide
ttgtgagaagagaaactgccta

SEQ ID NO: 8410 - DNA, 22 bp, Artificial Sequence
  Description of Artificial Sequence: Synthetic oligonucleotide
tatttcaaacagataattggca

SEQ ID NO: 8411 - DNA, 22 bp, Artificial Sequence
  Description of Artificial Sequence: Synthetic oligonucleotide
atttcactgaagaagaatgctg

SEQ ID NO: 8412 - DNA, 22 bp, Artificial Sequence
  Description of Artificial Sequence: Synthetic oligonucleotide
ttcaggtaagagttaatatgtc

SEQ ID NO: 8413 - DNA, 22 bp, Artificial Sequence
  Description of Artificial Sequence: Synthetic oligonucleotide
gagtacgaacaaattcacaggt

SEQ ID NO: 8414 - DNA, 22 bp, Artificial Sequence
  Description of Artificial Sequence: Synthetic oligonucleotide
taatagaattatctcgtaggcc

SEQ ID NO: 8415 - DNA, 22 bp, Artificial Sequence
  Description of Artificial Sequence: Synthetic oligonucleotide
atagtgaagccgaagccctggg

SEQ ID NO: 8416 - DNA, 22 bp, Artificial Sequence
  Description of Artificial Sequence: Synthetic oligonucleotide
aatatagacaatgacatcacct

SEQ ID NO: 8417 - DNA, 22 bp, Artificial Sequence
  Description of Artificial Sequence: Synthetic oligonucleotide
atataatccactccagggacct

SEQ ID NO: 8418 - DNA, 22 bp, Artificial Sequence
  Description of Artificial Sequence: Synthetic oligonucleotide
tatgggaatctgagagacaggg

SEQ ID NO: 8419 - DNA, 22 bp, Artificial Sequence
  Description of Artificial Sequence: Synthetic oligonucleotide
ttcttgtgcaacatcttctggg

SEQ ID NO: 8420 - DNA, 22 bp, Artificial Sequence
  Description of Artificial Sequence: Synthetic oligonucleotide
taaaggtgtagaagtaggtcct

SEQ ID NO: 8421 - DNA, 22 bp, Artificial Sequence
  Description of Artificial Sequence: Synthetic oligonucleotide
tttatctagtagattggcactc

SEQ ID NO: 8422 - DNA, 22 bp, Artificial Sequence
  Description of Artificial Sequence: Synthetic oligonucleotide
gtactttgtaacaataaagtgc

SEQ ID NO: 8423 - DNA, 22 bp, Artificial Sequence
  Description of Artificial Sequence: Synthetic oligonucleotide
taaatatatccatgtgagctcc

SEQ ID NO: 8424 - DNA, 22 bp, Artificial Sequence
  Description of Artificial Sequence: Synthetic oligonucleotide
ttatgtgatgcttcccaggctt

SEQ ID NO: 8425 - DNA, 22 bp, Artificial Sequence
  Description of Artificial Sequence: Synthetic oligonucleotide
ttaatagcttggattcagtgtt

SEQ ID NO: 8426 - DNA, 22 bp, Artificial Sequence
  Description of Artificial Sequence: Synthetic oligonucleotide
gtttgtactggaatagggctct

SEQ ID NO: 8427 - DNA, 22 bp, Artificial Sequence
  Description of Artificial Sequence: Synthetic oligonucleotide
tttcacaaggagacctaaaggg

SEQ ID NO: 8428 - DNA, 22 bp, Artificial Sequence
  Description of Artificial Sequence: Synthetic oligonucleotide
taattctagggtttcacaagga

SEQ ID NO: 8429 - DNA, 22 bp, Artificial Sequence
  Description of Artificial Sequence: Synthetic oligonucleotide
ttacttctaggtagtatgtgct

SEQ ID NO: 8430 - DNA, 22 bp, Artificial Sequence
  Description of Artificial Sequence: Synthetic oligonucleotide
ttataaattgctttcaggcctt

SEQ ID NO: 8431 - DNA, 22 bp, Artificial Sequence
  Description of Artificial Sequence: Synthetic oligonucleotide
tattccgagatgacccgcaggt

SEQ ID NO: 8432 - DNA, 22 bp, Artificial Sequence
  Description of Artificial Sequence: Synthetic oligonucleotide
tgatattccgagatgacccgca

SEQ ID NO: 8433 - DNA, 22 bp, Artificial Sequence
  Description of Artificial Sequence: Synthetic oligonucleotide
atttacagcaatcttcagtggt

SEQ ID NO: 8434 - DNA, 22 bp, Artificial Sequence
  Description of Artificial Sequence: Synthetic oligonucleotide
tttctgcattacactagcccag

SEQ ID NO: 8435 - DNA, 22 bp, Artificial Sequence
  Description of Artificial Sequence: Synthetic oligonucleotide
tattgatacacactaaacacaa

SEQ ID NO: 8436 - DNA, 22 bp, Artificial Sequence
  Description of Artificial Sequence: Synthetic oligonucleotide
atacttcatcaggcatatgcct

SEQ ID NO: 8437 - DNA, 22 bp, Artificial Sequence
  Description of Artificial Sequence: Synthetic oligonucleotide
ttaaagttccaagaagttccca

SEQ ID NO: 8438 - DNA, 22 bp, Artificial Sequence
  Description of Artificial Sequence: Synthetic oligonucleotide
attcctgtccagagagctgtct

SEQ ID NO: 8439 - DNA, 22 bp, Artificial Sequence
  Description of Artificial Sequence: Synthetic oligonucleotide
tttagcttccgggataagagct

SEQ ID NO: 8440 - DNA, 22 bp, Artificial Sequence
  Description of Artificial Sequence: Synthetic oligonucleotide
taacgtttaaggatgatacgga

SEQ ID NO: 8441 - DNA, 22 bp, Artificial Sequence
  Description of Artificial Sequence: Synthetic oligonucleotide
ataagttcctgactagccagct

SEQ ID NO: 8442 - DNA, 22 bp, Artificial Sequence
  Description of Artificial Sequence: Synthetic oligonucleotide
ttagtgcaaatcctagcgccgg

SEQ ID NO: 8443 - DNA, 22 bp, Artificial Sequence
  Description of Artificial Sequence: Synthetic oligonucleotide
ttctctttaaccgtgacgacgc

SEQ ID NO: 8444 - DNA, 22 bp, Artificial Sequence
  Description of Artificial Sequence: Synthetic oligonucleotide
ttgaccaatagaagcaaccggg

SEQ ID NO: 8445 - DNA, 22 bp, Artificial Sequence
  Description of Artificial Sequence: Synthetic oligonucleotide
ttgttccaggaaattcagtgct

SEQ ID NO: 8446 - DNA, 22 bp, Artificial Sequence
  Description of Artificial Sequence: Synthetic oligonucleotide
atagattctaaagtcagctgca

SEQ ID NO: 8447 - DNA, 22 bp, Artificial Sequence
  Description of Artificial Sequence: Synthetic oligonucleotide
ttctaaagtcagctgcatctgt

SEQ ID NO: 8448 - DNA, 22 bp, Artificial Sequence
  Description of Artificial Sequence: Synthetic oligonucleotide
aattcatagcaaagaacaccaa

SEQ ID NO: 8449 - DNA, 22 bp, Artificial Sequence
  Description of Artificial Sequence: Synthetic oligonucleotide
tttcttcaaagctatgaggcgt

SEQ ID NO: 8450 - DNA, 22 bp, Artificial Sequence
  Description of Artificial Sequence: Synthetic oligonucleotide
tttccgaatgatctcctctcgc

SEQ ID NO: 8451 - DNA, 22 bp, Artificial Sequence
  Description of Artificial Sequence: Synthetic oligonucleotide
tttcttctggagccagcgtggc

SEQ ID NO: 8452 - DNA, 22 bp, Artificial Sequence
  Description of Artificial Sequence: Synthetic oligonucleotide
tttgtgttcatgatctggtggc

SEQ ID NO: 8453 - DNA, 22 bp, Artificial Sequence
  Description of Artificial Sequence: Synthetic oligonucleotide
attgatcataggcgtgtcgccc

SEQ ID NO: 8454 - DNA, 22 bp, Artificial Sequence
  Description of Artificial Sequence: Synthetic oligonucleotide
atcactattcagagtatttccc

SEQ ID NO: 8455 - DNA, 22 bp, Artificial Sequence
  Description of Artificial Sequence: Synthetic oligonucleotide
atattgtaggtgactggcaggg

SEQ ID NO: 8456 - DNA, 22 bp, Artificial Sequence
  Description of Artificial Sequence: Synthetic oligonucleotide
tatatctatatcaatcagggca

SEQ ID NO: 8457 - DNA, 22 bp, Artificial Sequence
  Description of Artificial Sequence: Synthetic oligonucleotide
tttacttagcatatgttcacct

SEQ ID NO: 8458 - DNA, 22 bp, Artificial Sequence
  Description of Artificial Sequence: Synthetic oligonucleotide
ttactgaagaagaatttctcca

SEQ ID NO: 8459 - DNA, 22 bp, Artificial Sequence
  Description of Artificial Sequence: Synthetic oligonucleotide
gatagaaataaacttgtttggt

SEQ ID NO: 8460 - DNA, 22 bp, Artificial Sequence
  Description of Artificial Sequence: Synthetic oligonucleotide
ttcttcacggcgattcgggccg

SEQ ID NO: 8461 - DNA, 22 bp, Artificial Sequence
  Description of Artificial Sequence: Synthetic oligonucleotide
aatagatagaaataaacttgtt

SEQ ID NO: 8462 - DNA, 22 bp, Artificial Sequence
  Description of Artificial Sequence: Synthetic oligonucleotide
ataatgtcccagatagctatcc

SEQ ID NO: 8463 - DNA, 22 bp, Artificial Sequence
  Description of Artificial Sequence: Synthetic oligonucleotide
atgaatctggacactaggtgca

SEQ ID NO: 8464 - DNA, 22 bp, Artificial Sequence
  Description of Artificial Sequence: Synthetic oligonucleotide
gtatagcatgatattcttgtct

SEQ ID NO: 8465 - DNA, 22 bp, Artificial Sequence
  Description of Artificial Sequence: Synthetic oligonucleotide
ttcgattcgaagattagttggt

SEQ ID NO: 8466 - DNA, 22 bp, Artificial Sequence
  Description of Artificial Sequence: Synthetic oligonucleotide
atctctaatcaagaaagttcct

SEQ ID NO: 8467 - DNA, 22 bp, Artificial Sequence
  Description of Artificial Sequence: Synthetic oligonucleotide
atttcaaagggtagaatgccta

SEQ ID NO: 8468 - DNA, 22 bp, Artificial Sequence
  Description of Artificial Sequence: Synthetic oligonucleotide
ttaacagatattgttagtaggt

SEQ ID NO: 8469 - DNA, 22 bp, Artificial Sequence
  Description of Artificial Sequence: Synthetic oligonucleotide
ttaaattagattagcttcagct

SEQ ID NO: 8470 - DNA, 22 bp, Artificial Sequence
  Description of Artificial Sequence: Synthetic oligonucleotide
ttaaattgagagagaaagcggt

SEQ ID NO: 8471 - DNA, 22 bp, Artificial Sequence
  Description of Artificial Sequence: Synthetic oligonucleotide
ttcttaaacggcaatcttcggt

SEQ ID NO: 8472 - DNA, 22 bp, Artificial Sequence
  Description of Artificial Sequence: Synthetic oligonucleotide
ataccacagaactatctttcgg

SEQ ID NO: 8473 - DNA, 22 bp, Artificial Sequence
  Description of Artificial Sequence: Synthetic oligonucleotide
ataaactctgaaagtattcgct

SEQ ID NO: 8474 - DNA, 22 bp, Artificial Sequence
  Description of Artificial Sequence: Synthetic oligonucleotide
ttaatcttctactttgaccgga

SEQ ID NO: 8475 - DNA, 22 bp, Artificial Sequence
  Description of Artificial Sequence: Synthetic oligonucleotide
ttctgtgttaattgatagagtg

SEQ ID NO: 8476 - DNA, 22 bp, Artificial Sequence
  Description of Artificial Sequence: Synthetic oligonucleotide
ttataatgtgatgatgctactt

SEQ ID NO: 8477 - DNA, 22 bp, Artificial Sequence
  Description of Artificial Sequence: Synthetic oligonucleotide
tttcattcagccactggcttct

SEQ ID NO: 8478 - DNA, 22 bp, Artificial Sequence
  Description of Artificial Sequence: Synthetic oligonucleotide
atcaagtagggcagattgggaa

SEQ ID NO: 8479 - DNA, 22 bp, Artificial Sequence
  Description of Artificial Sequence: Synthetic oligonucleotide
caaagtcttagtgaagaaggcc

SEQ ID NO: 8480 - DNA, 22 bp, Artificial Sequence
  Description of Artificial Sequence: Synthetic oligonucleotide
taaatgtttgccactaattgat

SEQ ID NO: 8481 - DNA, 22 bp, Artificial Sequence
  Description of Artificial Sequence: Synthetic oligonucleotide
ttccaaaggcacaataacacca

SEQ ID NO: 8482 - DNA, 22 bp, Artificial Sequence
  Description of Artificial Sequence: Synthetic oligonucleotide
ttgactctccgaagttgcagcc

SEQ ID NO: 8483 - DNA, 22 bp, Artificial Sequence
  Description of Artificial Sequence: Synthetic oligonucleotide
ctaatacatgagatcacactca

SEQ ID NO: 8484 - DNA, 22 bp, Artificial Sequence
  Description of Artificial Sequence: Synthetic oligonucleotide
ttaatgaatgagccggaaccta

SEQ ID NO: 8485 - DNA, 22 bp, Artificial Sequence
  Description of Artificial Sequence: Synthetic oligonucleotide
gaaaggaatgcctctctgcggg

SEQ ID NO: 8486 - DNA, 22 bp, Artificial Sequence
  Description of Artificial Sequence: Synthetic oligonucleotide
attcctctagtctagatagcct

SEQ ID NO: 8487 - DNA, 22 bp, Artificial Sequence
  Description of Artificial Sequence: Synthetic oligonucleotide
aataaatgcaaattctggacct

SEQ ID NO: 8488 - DNA, 22 bp, Artificial Sequence
  Description of Artificial Sequence: Synthetic oligonucleotide
taatctttctactttgacccgg

SEQ ID NO: 8489 - DNA, 22 bp, Artificial Sequence
  Description of Artificial Sequence: Synthetic oligonucleotide
ttaattcctgagtggatgagca

SEQ ID NO: 8490 - DNA, 22 bp, Artificial Sequence
  Description of Artificial Sequence: Synthetic oligonucleotide
attcttgttctcatcctcggct

SEQ ID NO: 8491 - DNA, 22 bp, Artificial Sequence
  Description of Artificial Sequence: Synthetic oligonucleotide
ttctgaatacgggtgaatcgca

SEQ ID NO: 8492 - DNA, 22 bp, Artificial Sequence
  Description of Artificial Sequence: Synthetic oligonucleotide
ttatgaagcctgctggaagcct

SEQ ID NO: 8493 - DNA, 22 bp, Artificial Sequence
  Description of Artificial Sequence: Synthetic oligonucleotide
atatttgatgatggcctctcga

SEQ ID NO: 8494 - DNA, 22 bp, Artificial Sequence
  Description of Artificial Sequence: Synthetic oligonucleotide
taaacaggagaaatgtgctggt

SEQ ID NO: 8495 - DNA, 22 bp, Artificial Sequence
  Description of Artificial Sequence: Synthetic oligonucleotide
ttattacagcagaattacaggc

SEQ ID NO: 8496 - DNA, 22 bp, Artificial Sequence
  Description of Artificial Sequence: Synthetic oligonucleotide
aatatcaaacaccctattccgt

SEQ ID NO: 8497 - DNA, 22 bp, Artificial Sequence
  Description of Artificial Sequence: Synthetic oligonucleotide
taactgagcaacataataccca

SEQ ID NO: 8498 - DNA, 22 bp, Artificial Sequence
  Description of Artificial Sequence: Synthetic oligonucleotide
attatagtggaaatgtgtcctg

SEQ ID NO: 8499 - DNA, 22 bp, Artificial Sequence
  Description of Artificial Sequence: Synthetic oligonucleotide
ttaatagagaattatatgtccc

SEQ ID NO: 8500 - DNA, 22 bp, Artificial Sequence
  Description of Artificial Sequence: Synthetic oligonucleotide
ataaataagtccatccaagcca

SEQ ID NO: 8501 - DNA, 22 bp, Artificial Sequence
  Description of Artificial Sequence: Synthetic oligonucleotide
atcaattagtaaaccatgacca

SEQ ID NO: 8502 - DNA, 22 bp, Artificial Sequence
  Description of Artificial Sequence: Synthetic oligonucleotide
ataatcagttggtatcagaggg

SEQ ID NO: 8503 - DNA, 22 bp, Artificial Sequence
  Description of Artificial Sequence: Synthetic oligonucleotide
ttgatccaggacatgtatttgc

SEQ ID NO: 8504 - DNA, 22 bp, Artificial Sequence
  Description of Artificial Sequence: Synthetic oligonucleotide
ttctcgatgcccataatgttgt

SEQ ID NO: 8505 - DNA, 22 bp, Artificial Sequence
  Description of Artificial Sequence: Synthetic oligonucleotide
taagttaagttcctgcggacgc

SEQ ID NO: 8506 - DNA, 22 bp, Artificial Sequence
  Description of Artificial Sequence: Synthetic oligonucleotide
taatgttgttgggctgcatgca

SEQ ID NO: 8507 - DNA, 22 bp, Artificial Sequence
  Description of Artificial Sequence: Synthetic oligonucleotide
atttgtaataatacaaactcat

SEQ ID NO: 8508 - DNA, 22 bp, Artificial Sequence
  Description of Artificial Sequence: Synthetic oligonucleotide
taatcactacatccacgatgtt

SEQ ID NO: 8509 - DNA, 22 bp, Artificial Sequence
  Description of Artificial Sequence: Synthetic oligonucleotide
tttgttccaggaatacatactc

SEQ ID NO: 8510 - DNA, 22 bp, Artificial Sequence
  Description of Artificial Sequence: Synthetic oligonucleotide
aagagaaacacggagatgccca

SEQ ID NO: 8511 - DNA, 22 bp, Artificial Sequence
  Description of Artificial Sequence: Synthetic oligonucleotide
tttagtaaagcagctgggagca

SEQ ID NO: 8512 - DNA, 22 bp, Artificial Sequence
  Description of Artificial Sequence: Synthetic oligonucleotide
ttatccatggaattaaatacct

SEQ ID NO: 8513 - DNA, 22 bp, Artificial Sequence
  Description of Artificial Sequence: Synthetic oligonucleotide
ctaagtgatgagttacacctga

SEQ ID NO: 8514 - DNA, 22 bp, Artificial Sequence
  Description of Artificial Sequence: Synthetic oligonucleotide
attaaatacctaatgagggcta

SEQ ID NO: 8515 - DNA, 22 bp, Artificial Sequence
  Description of Artificial Sequence: Synthetic oligonucleotide
ataagcactgactttgggctga

SEQ ID NO: 8516 - DNA, 22 bp, Artificial Sequence
  Description of Artificial Sequence: Synthetic oligonucleotide
tttaagtgtctgacaggcacaa

SEQ ID NO: 8517 - DNA, 22 bp, Artificial Sequence
  Description of Artificial Sequence: Synthetic oligonucleotide
ttaagatgtcagtttaactgta

SEQ ID NO: 8518 - DNA, 22 bp, Artificial Sequence
  Description of Artificial Sequence: Synthetic oligonucleotide
atatgaaatcattgactcctgt

SEQ ID NO: 8519 - DNA, 22 bp, Artificial Sequence
  Description of Artificial Sequence: Synthetic oligonucleotide
ttgtgttaggaatgcatggctg

SEQ ID NO: 8520 - DNA, 22 bp, Artificial Sequence
  Description of Artificial Sequence: Synthetic oligonucleotide
tatacataagaggttgcttcag

SEQ ID NO: 8521 - DNA, 22 bp, Artificial Sequence
  Description of Artificial Sequence: Synthetic oligonucleotide
atggctattgcaattaaggccc

SEQ ID NO: 8522 - DNA, 22 bp, Artificial Sequence
  Description of Artificial Sequence: Synthetic oligonucleotide
tttaaaggtaccattctggcct

SEQ ID NO: 8523 - DNA, 22 bp, Artificial Sequence
  Description of Artificial Sequence: Synthetic oligonucleotide
ctctattgtcccattatggcct

SEQ ID NO: 8524 - DNA, 22 bp, Artificial Sequence
  Description of Artificial Sequence: Synthetic oligonucleotide
ttaccataaatctgtaacttct

SEQ ID NO: 8525 - DNA, 22 bp, Artificial Sequence
  Description of Artificial Sequence: Synthetic oligonucleotide
tagagtaataacattgacagtt

SEQ ID NO: 8526 - DNA, 22 bp, Artificial Sequence
  Description of Artificial Sequence: Synthetic oligonucleotide
aataacattgacagtttcacgt

SEQ ID NO: 8527 - DNA, 22 bp, Artificial Sequence
  Description of Artificial Sequence: Synthetic oligonucleotide
ctgcaataacttattctgggca

SEQ ID NO: 8528 - DNA, 22 bp, Artificial Sequence
  Description of Artificial Sequence: Synthetic oligonucleotide
ttaggttgtgagcttcacagga

SEQ ID NO: 8529 - DNA, 22 bp, Artificial Sequence
  Description of Artificial Sequence: Synthetic oligonucleotide
gtatgtaccgacagtcactggg

SEQ ID NO: 8530 - DNA, 22 bp, Artificial Sequence
  Description of Artificial Sequence: Synthetic oligonucleotide
tttcgatgccagcatatggcgt

SEQ ID NO: 8531 - DNA, 22 bp, Artificial Sequence
  Description of Artificial Sequence: Synthetic oligonucleotide
ttcaaatgtaacagaataaccc

SEQ ID NO: 8532 - DNA, 22 bp, Artificial Sequence
  Description of Artificial Sequence: Synthetic oligonucleotide
tttctttgcaaataacacagcg

SEQ ID NO: 8533 - DNA, 22 bp, Artificial Sequence
  Description of Artificial Sequence: Synthetic oligonucleotide
ttacaaagagtccttggtgttg

SEQ ID NO: 8534 - DNA, 22 bp, Artificial Sequence
  Description of Artificial Sequence: Synthetic oligonucleotide
tttatctgtgagcccaagtcca

SEQ ID NO: 8535 - DNA, 22 bp, Artificial Sequence
  Description of Artificial Sequence: Synthetic oligonucleotide
taacattggccctgtaattcgt

SEQ ID NO: 8536 - DNA, 22 bp, Artificial Sequence
  Description of Artificial Sequence: Synthetic oligonucleotide
ttgagatgaacgattattgggc

SEQ ID NO: 8537 - DNA, 22 bp, Artificial Sequence
  Description of Artificial Sequence: Synthetic oligonucleotide
tttcaagagacaaaccagagtt

SEQ ID NO: 8538 - DNA, 22 bp, Artificial Sequence
  Description of Artificial Sequence: Synthetic oligonucleotide
aatctcatgcagaagatttgtc

SEQ ID NO: 8539 - DNA, 22 bp, Artificial Sequence
  Description of Artificial Sequence: Synthetic oligonucleotide
atcattgatcatttgttcccgg

SEQ ID NO: 8540 - DNA, 22 bp, Artificial Sequence
  Description of Artificial Sequence: Synthetic oligonucleotide
taaatgtcagatcatcactggg

SEQ ID NO: 8541 - DNA, 22 bp, Artificial Sequence
  Description of Artificial Sequence: Synthetic oligonucleotide
ttggactaatcaataaactgcc

SEQ ID NO: 8542 - DNA, 22 bp, Artificial Sequence
  Description of Artificial Sequence: Synthetic oligonucleotide
ttaaatttctaggctttgaggg

SEQ ID NO: 8543 - DNA, 22 bp, Artificial Sequence
  Description of Artificial Sequence: Synthetic oligonucleotide
atctgagatgaatttctgggca

SEQ ID NO: 8544 - DNA, 22 bp, Artificial Sequence
  Description of Artificial Sequence: Synthetic oligonucleotide
atatctgagatgaatttctggg

SEQ ID NO: 8545 - DNA, 22 bp, Artificial Sequence
  Description of Artificial Sequence: Synthetic oligonucleotide
taaataattgcacgtgttagtc

SEQ ID NO: 8546 - DNA, 22 bp, Artificial Sequence
  Description of Artificial Sequence: Synthetic oligonucleotide
gttcaggttgcggtagcgggca

SEQ ID NO: 8547 - DNA, 22 bp, Artificial Sequence
  Description of Artificial Sequence: Synthetic oligonucleotide
taattgcacgtgttagtctcat

SEQ ID NO: 8548 - DNA, 22 bp, Artificial Sequence
  Description of Artificial Sequence: Synthetic oligonucleotide
ttcatatactctgtaagagcgt

SEQ ID NO: 8549 - DNA, 22 bp, Artificial Sequence
  Description of Artificial Sequence: Synthetic oligonucleotide
gtaaacataaactctcaaagct

SEQ ID NO: 8550 - DNA, 22 bp, Artificial Sequence
  Description of Artificial Sequence: Synthetic oligonucleotide
cttaatagcaacaatctggccg

SEQ ID NO: 8551 - DNA, 22 bp, Artificial Sequence
  Description of Artificial Sequence: Synthetic oligonucleotide
taatagcaacaatctggccggt

SEQ ID NO: 8552 - DNA, 22 bp, Artificial Sequence
  Description of Artificial Sequence: Synthetic oligonucleotide
atttggtttcagctggagaggc

SEQ ID NO: 8553 - DNA, 22 bp, Artificial Sequence
  Description of Artificial Sequence: Synthetic oligonucleotide
tttacattacaaataagcctgt

SEQ ID NO: 8554 - DNA, 22 bp, Artificial Sequence
  Description of Artificial Sequence: Synthetic oligonucleotide
gtaagatgtcctgtcagctggc

SEQ ID NO: 8555 - DNA, 22 bp, Artificial Sequence
  Description of Artificial Sequence: Synthetic oligonucleotide
attaaccaagactgacacaggt

SEQ ID NO: 8556 - DNA, 22 bp, Artificial Sequence
  Description of Artificial Sequence: Synthetic oligonucleotide
tatagcaagccaagtctgggtg

SEQ ID NO: 8557 - DNA, 22 bp, Artificial Sequence
  Description of Artificial Sequence: Synthetic oligonucleotide
tatgaccaagactttcacttct

SEQ ID NO: 8558 - DNA, 22 bp, Artificial Sequence
  Description of Artificial Sequence: Synthetic oligonucleotide
cttctattggtcatagtagcct

SEQ ID NO: 8559 - DNA, 22 bp, Artificial Sequence
  Description of Artificial Sequence: Synthetic oligonucleotide
ttatgttcaatcatggtctggg

SEQ ID NO: 8560 - DNA, 22 bp, Artificial Sequence
  Description of Artificial Sequence: Synthetic oligonucleotide
tttaattgcgacaacttgaccg

SEQ ID NO: 8561 - DNA, 22 bp, Artificial Sequence
  Description of Artificial Sequence: Synthetic oligonucleotide
atatttgactacatgagggctg

SEQ ID NO: 8562 - DNA, 22 bp, Artificial Sequence
  Description of Artificial Sequence: Synthetic oligonucleotide
ttaaatgcagccctgcaaaggg

SEQ ID NO: 8563 - DNA, 22 bp, Artificial Sequence
  Description of Artificial Sequence: Synthetic oligonucleotide
ttactctttcagataagaacct

SEQ ID NO: 8564 - DNA, 22 bp, Artificial Sequence
  Description of Artificial Sequence: Synthetic oligonucleotide
atagaggtcaacacagttgcga

SEQ ID NO: 8565 - DNA, 22 bp, Artificial Sequence
  Description of Artificial Sequence: Synthetic oligonucleotide
tattctcttaagagcaactgtc

SEQ ID NO: 8566 - DNA, 22 bp, Artificial Sequence
  Description of Artificial Sequence: Synthetic oligonucleotide
ataatcagagagaaggtgcccg

SEQ ID NO: 8567 - DNA, 22 bp, Artificial Sequence
  Description of Artificial Sequence: Synthetic oligonucleotide
ttcttctcacagttgaagccgg

SEQ ID NO: 8568 - DNA, 22 bp, Artificial Sequence
  Description of Artificial Sequence: Synthetic oligonucleotide
tttaaaggcagtgttatatcgg

SEQ ID NO: 8569 - DNA, 22 bp, Artificial Sequence
  Description of Artificial Sequence: Synthetic oligonucleotide
tttatatagcgaacaaactgct

SEQ ID NO: 8570 - DNA, 22 bp, Artificial Sequence
  Description of Artificial Sequence: Synthetic oligonucleotide
ataacttcttcaaacaattcct

SEQ ID NO: 8571 - DNA, 22 bp, Artificial Sequence
  Description of Artificial Sequence: Synthetic oligonucleotide
ttcatccatggaactttgtgct

SEQ ID NO: 8572 - DNA, 22 bp, Artificial Sequence
  Description of Artificial Sequence: Synthetic oligonucleotide
tttcacattaggagtagaagga

SEQ ID NO: 8573 - DNA, 22 bp, Artificial Sequence
  Description of Artificial Sequence: Synthetic oligonucleotide
atttctattcagaagcatccaa

SEQ ID NO: 8574 - DNA, 22 bp, Artificial Sequence
  Description of Artificial Sequence: Synthetic oligonucleotide
ttgagcaggaagtcataggcct

SEQ ID NO: 8575 - DNA, 22 bp, Artificial Sequence
  Description of Artificial Sequence: Synthetic oligonucleotide
ttgtataatcagaatgaatctt

SEQ ID NO: 8576 - DNA, 22 bp, Artificial Sequence
  Description of Artificial Sequence: Synthetic oligonucleotide
aatagatgggaaggaaagtcgt

SEQ ID NO: 8577 - DNA, 22 bp, Artificial Sequence
  Description of Artificial Sequence: Synthetic oligonucleotide
atattgcaacatttgcactcga

SEQ ID NO: 8578 - DNA, 22 bp, Artificial Sequence
  Description of Artificial Sequence: Synthetic oligonucleotide
attatccatctccttgtggccc

SEQ ID NO: 8579 - DNA, 22 bp, Artificial Sequence
  Description of Artificial Sequence: Synthetic oligonucleotide
taagagcaggaggctgaatgcc

SEQ ID NO: 8580 - DNA, 22 bp, Artificial Sequence
  Description of Artificial Sequence: Synthetic oligonucleotide
ttgacctttcatcctatcactt

SEQ ID NO: 8581 - DNA, 22 bp, Artificial Sequence
  Description of Artificial Sequence: Synthetic oligonucleotide
gattgcatttacattagctcct

SEQ ID NO: 8582 - DNA, 22 bp, Artificial Sequence
  Description of Artificial Sequence: Synthetic oligonucleotide
atatctctgaaacttgccagtg

SEQ ID NO: 8583 - DNA, 22 bp, Artificial Sequence
  Description of Artificial Sequence: Synthetic oligonucleotide
aatttcttgaatctacaatgcg

SEQ ID NO: 8584 - DNA, 22 bp, Artificial Sequence
  Description of Artificial Sequence: Synthetic oligonucleotide
tttcttgaatctacaatgcgac

SEQ ID NO: 8585 - DNA, 22 bp, Artificial Sequence
  Description of Artificial Sequence: Synthetic oligonucleotide
attgtaggtgaggatatccgct

SEQ ID NO: 8586 - DNA, 22 bp, Artificial Sequence
  Description of Artificial Sequence: Synthetic oligonucleotide
aatgtcagagactctgatgggc

SEQ ID NO: 8587 - DNA, 22 bp, Artificial Sequence
  Description of Artificial Sequence: Synthetic oligonucleotide
taattgtaggtgaggatatccg

SEQ ID NO: 8588 - DNA, 22 bp, Artificial Sequence
  Description of Artificial Sequence: Synthetic oligonucleotide
atagaagatcagccctttggcc

SEQ ID NO: 8589 - DNA, 22 bp, Artificial Sequence
  Description of Artificial Sequence: Synthetic oligonucleotide
aatcttctaaccctgggctccc

SEQ ID NO: 8590 - DNA, 22 bp, Artificial Sequence
  Description of Artificial Sequence: Synthetic oligonucleotide
aagagggaggagtagaaacgct

SEQ ID NO: 8591 - DNA, 22 bp, Artificial Sequence
  Description of Artificial Sequence: Synthetic oligonucleotide
taatgcacatacagggtttgca

SEQ ID NO: 8592 - DNA, 22 bp, Artificial Sequence
  Description of Artificial Sequence: Synthetic oligonucleotide
atagtccatggtgttggcgctg

SEQ ID NO: 8593 - DNA, 22 bp, Artificial Sequence
  Description of Artificial Sequence: Synthetic oligonucleotide
ttccaataaggctttggcacag

SEQ ID NO: 8594 - DNA, 22 bp, Artificial Sequence
  Description of Artificial Sequence: Synthetic oligonucleotide
tgtactcatcacagaatgggag

SEQ ID NO: 8595 - DNA, 22 bp, Artificial Sequence
  Description of Artificial Sequence: Synthetic oligonucleotide
tagagatttgagtgtggaagcc

SEQ ID NO: 8596 - DNA, 22 bp, Artificial Sequence
  Description of Artificial Sequence: Synthetic oligonucleotide
taatagatggactttcactgga

SEQ ID NO: 8597 - DNA, 22 bp, Artificial Sequence
  Description of Artificial Sequence: Synthetic oligonucleotide
ttctaggagtagttgaagtccg

SEQ ID NO: 8598 - DNA, 22 bp, Artificial Sequence
  Description of Artificial Sequence: Synthetic oligonucleotide
atcagttacatcagaaatgcct

SEQ ID NO: 8599 - DNA, 22 bp, Artificial Sequence
  Description of Artificial Sequence: Synthetic oligonucleotide
aattcagatgagaaatatggcg

SEQ ID NO: 8600 - DNA, 22 bp, Artificial Sequence
  Description of Artificial Sequence: Synthetic oligonucleotide
aacagctttcacataaatgcca

SEQ ID NO: 8601 - DNA, 22 bp, Artificial Sequence
  Description of Artificial Sequence: Synthetic oligonucleotide
ttatttcaaatggttgcctgat

SEQ ID NO: 8602 - DNA, 22 bp, Artificial Sequence
  Description of Artificial Sequence: Synthetic oligonucleotide
ctgagtcacggctgaggcggcg

SEQ ID NO: 8603 - DNA, 22 bp, Artificial Sequence
  Description of Artificial Sequence: Synthetic oligonucleotide
taaattaatactcttgatagct

SEQ ID NO: 8604 - DNA, 22 bp, Artificial Sequence
  Description of Artificial Sequence: Synthetic oligonucleotide
ttattctggaacttatgaggct

SEQ ID NO: 8605 - DNA, 22 bp, Artificial Sequence
  Description of Artificial Sequence: Synthetic oligonucleotide
ttgacaatgtccttgaacaggt

SEQ ID NO: 8606 - DNA, 22 bp, Artificial Sequence
  Description of Artificial Sequence: Synthetic oligonucleotide
ttaagttcagtaaacctgggcc

SEQ ID NO: 8607 - DNA, 22 bp, Artificial Sequence
  Description of Artificial Sequence: Synthetic oligonucleotide
ttaggtcagccatattctccgc

SEQ ID NO: 8608 - DNA, 22 bp, Artificial Sequence
  Description of Artificial Sequence: Synthetic oligonucleotide
tagaagaaattcaaagttggct

SEQ ID NO: 8609 - DNA, 22 bp, Artificial Sequence
  Description of Artificial Sequence: Synthetic oligonucleotide
tattgcataaagtctatgtggt

SEQ ID NO: 8610 - DNA, 22 bp, Artificial Sequence
  Description of Artificial Sequence: Synthetic oligonucleotide
tttatgttaaacaacatcactt

SEQ ID NO: 8611 - DNA, 22 bp, Artificial Sequence
  Description of Artificial Sequence: Synthetic oligonucleotide
ataccatcagtgtttacacccg

SEQ ID NO: 8612 - DNA, 22 bp, Artificial Sequence
  Description of Artificial Sequence: Synthetic oligonucleotide
ttagattggagaagtttggccg

SEQ ID NO: 8613 - DNA, 22 bp, Artificial Sequence
  Description of Artificial Sequence: Synthetic oligonucleotide
aatccatttgtctctttcggcc

SEQ ID NO: 8614 - DNA, 22 bp, Artificial Sequence
  Description of Artificial Sequence: Synthetic oligonucleotide
aaccaatttgaaataattggat

SEQ ID NO: 8615 - DNA, 22 bp, Artificial Sequence
  Description of Artificial Sequence: Synthetic oligonucleotide
attaggaggaggatcaagggtt

SEQ ID NO: 8616 - DNA, 22 bp, Artificial Sequence
  Description of Artificial Sequence: Synthetic oligonucleotide
atttgaaataattggatgtctt

SEQ ID NO: 8617 - DNA, 22 bp, Artificial Sequence
  Description of Artificial Sequence: Synthetic oligonucleotide
gtaagtatacaacctacacggt

SEQ ID NO: 8618 - DNA, 22 bp, Artificial Sequence
  Description of Artificial Sequence: Synthetic oligonucleotide
tttctgtttaagagatcggcct

SEQ ID NO: 8619 - DNA, 22 bp, Artificial Sequence
  Description of Artificial Sequence: Synthetic oligonucleotide
caggaatgacaaatgatccggc

SEQ ID NO: 8620 - DNA, 22 bp, Artificial Sequence
  Description of Artificial Sequence: Synthetic oligonucleotide
tataccattcactgtctcagca

SEQ ID NO: 8621 - DNA, 22 bp, Artificial Sequence
  Description of Artificial Sequence: Synthetic oligonucleotide
ataactgttctgcatatatgct

SEQ ID NO: 8622 - DNA, 22 bp, Artificial Sequence
  Description of Artificial Sequence: Synthetic oligonucleotide
tttccatttgattctcattgac

SEQ ID NO: 8623 - DNA, 22 bp, Artificial Sequence
  Description of Artificial Sequence: Synthetic oligonucleotide
tatcagtgccaggttacaactt

SEQ ID NO: 8624 - DNA, 22 bp, Artificial Sequence
  Description of Artificial Sequence: Synthetic oligonucleotide
ttctttaaggcctttattgcga

SEQ ID NO: 8625 - DNA, 22 bp, Artificial Sequence
  Description of Artificial Sequence: Synthetic oligonucleotide
tttctggatatacatctgcccg

SEQ ID NO: 8626 - DNA, 22 bp, Artificial Sequence
  Description of Artificial Sequence: Synthetic oligonucleotide
tttatccacctcatccaacgga

SEQ ID NO: 8627 - DNA, 22 bp, Artificial Sequence
  Description of Artificial Sequence: Synthetic oligonucleotide
tttatgccacaaaggttggcca

SEQ ID NO: 8628 - DNA, 22 bp, Artificial Sequence
  Description of Artificial Sequence: Synthetic oligonucleotide
atctccttccgttcaagttcct

SEQ ID NO: 8629 - DNA, 22 bp, Artificial Sequence
  Description of Artificial Sequence: Synthetic oligonucleotide
tattagaaacatcatccagccc

SEQ ID NO: 8630 - DNA, 22 bp, Artificial Sequence
  Description of Artificial Sequence: Synthetic oligonucleotide
atacattagaagtctatatccc

SEQ ID NO: 8631 - DNA, 22 bp, Artificial Sequence
  Description of Artificial Sequence: Synthetic oligonucleotide
tataagatccttggactgtggg

SEQ ID NO: 8632 - DNA, 22 bp, Artificial Sequence
  Description of Artificial Sequence: Synthetic oligonucleotide
atacctctcgatctagtgccca

SEQ ID NO: 8633 - DNA, 22 bp, Artificial Sequence
  Description of Artificial Sequence: Synthetic oligonucleotide
attgttcatctctagcttgggc

SEQ ID NO: 8634 - DNA, 22 bp, Artificial Sequence
  Description of Artificial Sequence: Synthetic oligonucleotide
tatattctggaatacctctcga

SEQ ID NO: 8635 - DNA, 22 bp, Artificial Sequence
  Description of Artificial Sequence: Synthetic oligonucleotide
ttctctgagtagacatgctcct

SEQ ID NO: 8636 - DNA, 22 bp, Artificial Sequence
  Description of Artificial Sequence: Synthetic oligonucleotide
aatcatttccagagagagtgct

SEQ ID NO: 8637 - DNA, 22 bp, Artificial Sequence
  Description of Artificial Sequence: Synthetic oligonucleotide
aatatttccgggttggagaccc

SEQ ID NO: 8638 - DNA, 22 bp, Artificial Sequence
  Description of Artificial Sequence: Synthetic oligonucleotide
ttatttaagtcatcccagaccc

SEQ ID NO: 8639 - DNA, 22 bp, Artificial Sequence
  Description of Artificial Sequence: Synthetic oligonucleotide
cagtcctttaagtctatgacgg

SEQ ID NO: 8640 - DNA, 22 bp, Artificial Sequence
  Description of Artificial Sequence: Synthetic oligonucleotide
tttacagcacacagagaccgcc

SEQ ID NO: 8641 - DNA, 22 bp, Artificial Sequence
  Description of Artificial Sequence: Synthetic oligonucleotide
atatataagcacgccaaggccc

SEQ ID NO: 8642 - DNA, 22 bp, Artificial Sequence
  Description of Artificial Sequence: Synthetic oligonucleotide
tttcattacattctttgcacct

SEQ ID NO: 8643 - DNA, 22 bp, Artificial Sequence
  Description of Artificial Sequence: Synthetic oligonucleotide
atctgatacaacaatatgtgca

SEQ ID NO: 8644 - DNA, 22 bp, Artificial Sequence
  Description of Artificial Sequence: Synthetic oligonucleotide
tttgaagaagtattagaatggt

SEQ ID NO: 8645 - DNA, 22 bp, Artificial Sequence
  Description of Artificial Sequence: Synthetic oligonucleotide
taatcattggaagatgtccctc

SEQ ID NO: 8646 - DNA, 22 bp, Artificial Sequence
  Description of Artificial Sequence: Synthetic oligonucleotide
aactagagacagatcaacgggc

SEQ ID NO: 8647 - DNA, 22 bp, Artificial Sequence
  Description of Artificial Sequence: Synthetic oligonucleotide
ttagataatccgaaatcggcta

SEQ ID NO: 8648 - DNA, 22 bp, Artificial Sequence
  Description of Artificial Sequence: Synthetic oligonucleotide
ttaacctattaaagatattgcc

SEQ ID NO: 8649 - DNA, 22 bp, Artificial Sequence
  Description of Artificial Sequence: Synthetic oligonucleotide
ttgtggttacctgttacatgac

SEQ ID NO: 8650 - DNA, 22 bp, Artificial Sequence
  Description of Artificial Sequence: Synthetic oligonucleotide
tttatggtgcacattcatgccg

SEQ ID NO: 8651 - DNA, 22 bp, Artificial Sequence
  Description of Artificial Sequence: Synthetic oligonucleotide
atatcccaacaggctctgagga

SEQ ID NO: 8652 - DNA, 22 bp, Artificial Sequence
  Description of Artificial Sequence: Synthetic oligonucleotide
atatagtgtcccggctgttggc

SEQ ID NO: 8653 - DNA, 22 bp, Artificial Sequence
  Description of Artificial Sequence: Synthetic oligonucleotide
ttcagtatggcctcaaagaggt

SEQ ID NO: 8654 - DNA, 22 bp, Artificial Sequence
  Description of Artificial Sequence: Synthetic oligonucleotide
tttaactgccactttatggcct

SEQ ID NO: 8655 - DNA, 22 bp, Artificial Sequence
  Description of Artificial Sequence: Synthetic oligonucleotide
taattcatcaagggtatggcgt

SEQ ID NO: 8656 - DNA, 22 bp, Artificial Sequence
  Description of Artificial Sequence: Synthetic oligonucleotide
atctattatgagatggtaggca

SEQ ID NO: 8657 - DNA, 22 bp, Artificial Sequence
  Description of Artificial Sequence: Synthetic oligonucleotide
ttcatgtgtgcatcaagcagga

SEQ ID NO: 8658 - DNA, 22 bp, Artificial Sequence
  Description of Artificial Sequence: Synthetic oligonucleotide
tatatctacctctgggcctgca

SEQ ID NO: 8659 - DNA, 22 bp, Artificial Sequence
  Description of Artificial Sequence: Synthetic oligonucleotide
gattatgtacacgtgagatggc

SEQ ID NO: 8660 - DNA, 22 bp, Artificial Sequence
  Description of Artificial Sequence: Synthetic oligonucleotide
tattccatcacgtctaagacct

SEQ ID NO: 8661 - DNA, 22 bp, Artificial Sequence
  Description of Artificial Sequence: Synthetic oligonucleotide
ttaagatcagatagcgtgtcca

SEQ ID NO: 8662 - DNA, 22 bp, Artificial Sequence
  Description of Artificial Sequence: Synthetic oligonucleotide
ctaaactgtgaggaactttgcg

SEQ ID NO: 8663 - DNA, 22 bp, Artificial Sequence
  Description of Artificial Sequence: Synthetic oligonucleotide
atagcagagcaatcaaacacgt

SEQ ID NO: 8664 - DNA, 22 bp, Artificial Sequence
  Description of Artificial Sequence: Synthetic oligonucleotide
ttacctcatcattaaataacct

SEQ ID NO: 8665 - DNA, 22 bp, Artificial Sequence
  Description of Artificial Sequence: Synthetic oligonucleotide
tcatagacgaagatggacacgg

SEQ ID NO: 8666 - DNA, 22 bp, Artificial Sequence
  Description of Artificial Sequence: Synthetic oligonucleotide
atattcactgagatcatgcgga

SEQ ID NO: 8667 - DNA, 22 bp, Artificial Sequence
  Description of Artificial Sequence: Synthetic oligonucleotide
attgttccagaaatacagagcc

SEQ ID NO: 8668 - DNA, 22 bp, Artificial Sequence
  Description of Artificial Sequence: Synthetic oligonucleotide
ttaatctccaagagtcacagtc

SEQ ID NO: 8669 - DNA, 22 bp, Artificial Sequence
  Description of Artificial Sequence: Synthetic oligonucleotide
ctatacattcataaggattcct

SEQ ID NO: 8670 - DNA, 22 bp, Artificial Sequence
  Description of Artificial Sequence: Synthetic oligonucleotide
ttccataaacaacttcagggca

SEQ ID NO: 8671 - DNA, 22 bp, Artificial Sequence
  Description of Artificial Sequence: Synthetic oligonucleotide
tatattcatcagttattgtcca

SEQ ID NO: 8672 - DNA, 22 bp, Artificial Sequence
  Description of Artificial Sequence: Synthetic oligonucleotide
ataactttggtgagaataatct

SEQ ID NO: 8673 - DNA, 22 bp, Artificial Sequence
  Description of Artificial Sequence: Synthetic oligonucleotide
tcaaacttaaacagaatggcct

SEQ ID NO: 8674 - DNA, 22 bp, Artificial Sequence
  Description of Artificial Sequence: Synthetic oligonucleotide
tttagtcacaatatttcaagcc

SEQ ID NO: 8675 - DNA, 22 bp, Artificial Sequence
  Description of Artificial Sequence: Synthetic oligonucleotide
taaatctggcagctcttaactc

SEQ ID NO: 8676 - DNA, 22 bp, Artificial Sequence
  Description of Artificial Sequence: Synthetic oligonucleotide
gtatgcataggaataagaacct

SEQ ID NO: 8677 - DNA, 22 bp, Artificial Sequence
  Description of Artificial Sequence: Synthetic oligonucleotide
ttactatatcagaatacgctga

SEQ ID NO: 8678 - DNA, 22 bp, Artificial Sequence
  Description of Artificial Sequence: Synthetic oligonucleotide
gttctgtttcatatataaacct

SEQ ID NO: 8679 - DNA, 22 bp, Artificial Sequence
  Description of Artificial Sequence: Synthetic oligonucleotide
ttcttgatccacttgatgactg

SEQ ID NO: 8680 - DNA, 22 bp, Artificial Sequence
  Description of Artificial Sequence: Synthetic oligonucleotide
cactacactgaagaactcgcgg

SEQ ID NO: 8681 - DNA, 22 bp, Artificial Sequence
  Description of Artificial Sequence: Synthetic oligonucleotide
gagacgtaggcgatgaagtcgt

SEQ ID NO: 8682 - DNA, 22 bp, Artificial Sequence
  Description of Artificial Sequence: Synthetic oligonucleotide
ttaatgtaagtgctgacttcct

SEQ ID NO: 8683 - DNA, 22 bp, Artificial Sequence
  Description of Artificial Sequence: Synthetic oligonucleotide
aactcattaaagtcaatgcttc

SEQ ID NO: 8684 - DNA, 22 bp, Artificial Sequence
  Description of Artificial Sequence: Synthetic oligonucleotide
tttgtatgtgagtgaaattcgg

SEQ ID NO: 8685 - DNA, 22 bp, Artificial Sequence
  Description of Artificial Sequence: Synthetic oligonucleotide
taccaataacagcttgctaggg

SEQ ID NO: 8686 - DNA, 22 bp, Artificial Sequence
  Description of Artificial Sequence: Synthetic oligonucleotide
tttcgtgaaatcactctctctc

SEQ ID NO: 8687 - DNA, 22 bp, Artificial Sequence
  Description of Artificial Sequence: Synthetic oligonucleotide
ttaggatagcagcctaggtcag

SEQ ID NO: 8688 - DNA, 22 bp, Artificial Sequence
  Description of Artificial Sequence: Synthetic oligonucleotide
tactttgtgaagattgtgaggt

SEQ ID NO: 8689 - DNA, 22 bp, Artificial Sequence
  Description of Artificial Sequence: Synthetic oligonucleotide
attgcctatgaggcactttggg

SEQ ID NO: 8690 - DNA, 22 bp, Artificial Sequence
  Description of Artificial Sequence: Synthetic oligonucleotide
ttaaccaagcaggtccaaggtc

SEQ ID NO: 8691 - DNA, 22 bp, Artificial Sequence
  Description of Artificial Sequence: Synthetic oligonucleotide
tttagaaatcagtggatatgct

SEQ ID NO: 8692 - DNA, 22 bp, Artificial Sequence
  Description of Artificial Sequence: Synthetic oligonucleotide
atcaatattcacatcaaagccc

SEQ ID NO: 8693 - DNA, 22 bp, Artificial Sequence
  Description of Artificial Sequence: Synthetic oligonucleotide
ttattacttcagggtactgcct

SEQ ID NO: 8694 - DNA, 22 bp, Artificial Sequence
  Description of Artificial Sequence: Synthetic oligonucleotide
atacttcctcatattgtggcca

SEQ ID NO: 8695 - DNA, 22 bp, Artificial Sequence
  Description of Artificial Sequence: Synthetic oligonucleotide
tttgtcaatgccataagatgag

SEQ ID NO: 8696 - DNA, 22 bp, Artificial Sequence
  Description of Artificial Sequence: Synthetic oligonucleotide
atagatttagaccatatcacgc

SEQ ID NO: 8697 - DNA, 22 bp, Artificial Sequence
  Description of Artificial Sequence: Synthetic oligonucleotide
ttaagagcttcaataagctggt

SEQ ID NO: 8698 - DNA, 22 bp, Artificial Sequence
  Description of Artificial Sequence: Synthetic oligonucleotide
atttgaaagagtgccattgcca

SEQ ID NO: 8699 - DNA, 22 bp, Artificial Sequence
  Description of Artificial Sequence: Synthetic oligonucleotide
aatatgtattcgtttgggaggt

SEQ ID NO: 8700 - DNA, 22 bp, Artificial Sequence
  Description of Artificial Sequence: Synthetic oligonucleotide
atttcctccaagatcatctgct

SEQ ID NO: 8701 - DNA, 22 bp, Artificial Sequence
  Description of Artificial Sequence: Synthetic oligonucleotide
atatagtcctccactcactggc

SEQ ID NO: 8702 - DNA, 22 bp, Artificial Sequence
  Description of Artificial Sequence: Synthetic oligonucleotide
attaggtgtgctaagcagggct

SEQ ID NO: 8703 - DNA, 22 bp, Artificial Sequence
  Description of Artificial Sequence: Synthetic oligonucleotide
atattcaataagaatgcaacct

SEQ ID NO: 8704 - DNA, 22 bp, Artificial Sequence
  Description of Artificial Sequence: Synthetic oligonucleotide
tttcagtgtgcgttcatcacgt

SEQ ID NO: 8705 - DNA, 22 bp, Artificial Sequence
  Description of Artificial Sequence: Synthetic oligonucleotide
attcgttccatcattgccaggt

SEQ ID NO: 8706 - DNA, 22 bp, Artificial Sequence
  Description of Artificial Sequence: Synthetic oligonucleotide
tagtaagaccactgattcccat

SEQ ID NO: 8707 - DNA, 22 bp, Artificial Sequence
  Description of Artificial Sequence: Synthetic oligonucleotide
tatagtaagaccactgattccc

SEQ ID NO: 8708 - DNA, 22 bp, Artificial Sequence
  Description of Artificial Sequence: Synthetic oligonucleotide
ataagaatgcaacctatgctcc

SEQ ID NO: 8709 - DNA, 22 bp, Artificial Sequence
  Description of Artificial Sequence: Synthetic oligonucleotide
ttatgctatggaaagaggtcgt

SEQ ID NO: 8710 - DNA, 22 bp, Artificial Sequence
  Description of Artificial Sequence: Synthetic oligonucleotide
ttctttaaagaaattggtgcct

SEQ ID NO: 8711 - DNA, 22 bp, Artificial Sequence
  Description of Artificial Sequence: Synthetic oligonucleotide
tttaagcagcacatgtgacctg

SEQ ID NO: 8712 - DNA, 22 bp, Artificial Sequence
  Description of Artificial Sequence: Synthetic oligonucleotide
tactactagaacttgggcaggt

SEQ ID NO: 8713 - DNA, 22 bp, Artificial Sequence
  Description of Artificial Sequence: Synthetic oligonucleotide
tatttggatcatcatctcaggg

SEQ ID NO: 8714 - DNA, 22 bp, Artificial Sequence
  Description of Artificial Sequence: Synthetic oligonucleotide
tttgatgacaaggtgaacagtc

SEQ ID NO: 8715 - DNA, 22 bp, Artificial Sequence
  Description of Artificial Sequence: Synthetic oligonucleotide
gaggatttgcagtaaacagcgg

SEQ ID NO: 8716 - DNA, 22 bp, Artificial Sequence
  Description of Artificial Sequence: Synthetic oligonucleotide
atactgtctcacaaattcccgc

SEQ ID NO: 8717 - DNA, 22 bp, Artificial Sequence
  Description of Artificial Sequence: Synthetic oligonucleotide
taaataacagctcttgtgaggg

SEQ ID NO: 8718 - DNA, 22 bp, Artificial Sequence
  Description of Artificial Sequence: Synthetic oligonucleotide
aatgcagaagtgatgcatgcag

SEQ ID NO: 8719 - DNA, 22 bp, Artificial Sequence
  Description of Artificial Sequence: Synthetic oligonucleotide
tactattaggagttgatgatgt

SEQ ID NO: 8720 - DNA, 22 bp, Artificial Sequence
  Description of Artificial Sequence: Synthetic oligonucleotide
ataattaactgtctcatcaggt

SEQ ID NO: 8721 - DNA, 22 bp, Artificial Sequence
  Description of Artificial Sequence: Synthetic oligonucleotide
attaaattgccaacaatgtggc

SEQ ID NO: 8722 - DNA, 22 bp, Artificial Sequence
  Description of Artificial Sequence: Synthetic oligonucleotide
ttattacatgacgaggaaacca

SEQ ID NO: 8723 - DNA, 22 bp, Artificial Sequence
  Description of Artificial Sequence: Synthetic oligonucleotide
aagatttatgaagagattggca

SEQ ID NO: 8724 - DNA, 22 bp, Artificial Sequence
  Description of Artificial Sequence: Synthetic oligonucleotide
ttctaaagtcactatcattcca

SEQ ID NO: 8725 - DNA, 22 bp, Artificial Sequence
  Description of Artificial Sequence: Synthetic oligonucleotide
attaatatcaaattccagtggt

SEQ ID NO: 8726 - DNA, 22 bp, Artificial Sequence
  Description of Artificial Sequence: Synthetic oligonucleotide
ttccctaatgcaagagagtcct

SEQ ID NO: 8727 - DNA, 22 bp, Artificial Sequence
  Description of Artificial Sequence: Synthetic oligonucleotide
ataagaaatggtagcttcccga

SEQ ID NO: 8728 - DNA, 22 bp, Artificial Sequence
  Description of Artificial Sequence: Synthetic oligonucleotide
atataagaaatggtagcttccc

SEQ ID NO: 8729 - DNA, 22 bp, Artificial Sequence
  Description of Artificial Sequence: Synthetic oligonucleotide
tttaaacaggtatgcatggcct

SEQ ID NO: 8730 - DNA, 22 bp, Artificial Sequence
  Description of Artificial Sequence: Synthetic oligonucleotide
tacatcattaagaaactctcct

SEQ ID NO: 8731 - DNA, 22 bp, Artificial Sequence
  Description of Artificial Sequence: Synthetic oligonucleotide
ttgaacatggacatcctctggt

SEQ ID NO: 8732 - DNA, 22 bp, Artificial Sequence
  Description of Artificial Sequence: Synthetic oligonucleotide
ttattccagaaaggtcgcagcc

SEQ ID NO: 8733 - DNA, 22 bp, Artificial Sequence
  Description of Artificial Sequence: Synthetic oligonucleotide
tctactttaaatctagggaggc

SEQ ID NO: 8734 - DNA, 22 bp, Artificial Sequence
  Description of Artificial Sequence: Synthetic oligonucleotide
tataatgttgtccttatgagat

SEQ ID NO: 8735 - DNA, 22 bp, Artificial Sequence
  Description of Artificial Sequence: Synthetic oligonucleotide
atgttggctgacttgatgacct

SEQ ID NO: 8736 - DNA, 22 bp, Artificial Sequence
  Description of Artificial Sequence: Synthetic oligonucleotide
ttgttctatgaaatcggctgtt

SEQ ID NO: 8737 - DNA, 22 bp, Artificial Sequence
  Description of Artificial Sequence: Synthetic oligonucleotide
ttctgtgttaagataaatggtg

SEQ ID NO: 8738 - DNA, 22 bp, Artificial Sequence
  Description of Artificial Sequence: Synthetic oligonucleotide
atatcgatacagatacttctct

SEQ ID NO: 8739 - DNA, 22 bp, Artificial Sequence
  Description of Artificial Sequence: Synthetic oligonucleotide
ttaagataaatggtgaagtgtc

SEQ ID NO: 8740 - DNA, 22 bp, Artificial Sequence
  Description of Artificial Sequence: Synthetic oligonucleotide
atatcatagacaatgtactcgt

SEQ ID NO: 8741 - DNA, 22 bp, Artificial Sequence
  Description of Artificial Sequence: Synthetic oligonucleotide
ttgtcatccaagagaatgttct

SEQ ID NO: 8742 - DNA, 22 bp, Artificial Sequence
  Description of Artificial Sequence: Synthetic oligonucleotide
attctcatagaagtcctgtgca

SEQ ID NO: 8743 - DNA, 22 bp, Artificial Sequence
  Description of Artificial Sequence: Synthetic oligonucleotide
atatctcaggcaccagtgtgat

SEQ ID NO: 8744 - DNA, 22 bp, Artificial Sequence
  Description of Artificial Sequence: Synthetic oligonucleotide
ctataggaacagcacctgtcgc

SEQ ID NO: 8745 - DNA, 22 bp, Artificial Sequence
  Description of Artificial Sequence: Synthetic oligonucleotide
aatacagaagaaagcatcgcac

SEQ ID NO: 8746 - DNA, 22 bp, Artificial Sequence
  Description of Artificial Sequence: Synthetic oligonucleotide
atttacaataacaaacacacgc

SEQ ID NO: 8747 - DNA, 22 bp, Artificial Sequence
  Description of Artificial Sequence: Synthetic oligonucleotide
tttcatttggaaggatagaggg

SEQ ID NO: 8748 - DNA, 22 bp, Artificial Sequence
  Description of Artificial Sequence: Synthetic oligonucleotide
taaagcataaacattaaatggg

SEQ ID NO: 8749 - DNA, 22 bp, Artificial Sequence
  Description of Artificial Sequence: Synthetic oligonucleotide
ttcttccagcattgtgatgcct

SEQ ID NO: 8750 - DNA, 22 bp, Artificial Sequence
  Description of Artificial Sequence: Synthetic oligonucleotide
ttattgtagaaagtagaatcca

SEQ ID NO: 8751 - DNA, 22 bp, Artificial Sequence
  Description of Artificial Sequence: Synthetic oligonucleotide
aatatattcatgtccatccggg

SEQ ID NO: 8752 - DNA, 22 bp, Artificial Sequence
  Description of Artificial Sequence: Synthetic oligonucleotide
taaatattacatataagcgcct

SEQ ID NO: 8753 - DNA, 22 bp, Artificial Sequence
  Description of Artificial Sequence: Synthetic oligonucleotide
ttatggctcctcgctgagctgg

SEQ ID NO: 8754 - DNA, 22 bp, Artificial Sequence
  Description of Artificial Sequence: Synthetic oligonucleotide
aatctaaatgactctgtgccgt

SEQ ID NO: 8755 - DNA, 22 bp, Artificial Sequence
  Description of Artificial Sequence: Synthetic oligonucleotide
tttgtgcttcatcgtaataggg

SEQ ID NO: 8756 - DNA, 22 bp, Artificial Sequence
  Description of Artificial Sequence: Synthetic oligonucleotide
ttatcgccagacatcatgaggg

SEQ ID NO: 8757 - DNA, 22 bp, Artificial Sequence
  Description of Artificial Sequence: Synthetic oligonucleotide
ctttaagacaggcctctctgcc

SEQ ID NO: 8758 - DNA, 22 bp, Artificial Sequence
  Description of Artificial Sequence: Synthetic oligonucleotide
ttaactaatcgaagagccactg

SEQ ID NO: 8759 - DNA, 22 bp, Artificial Sequence
  Description of Artificial Sequence: Synthetic oligonucleotide
aatatctataaatatagaagga

SEQ ID NO: 8760 - DNA, 22 bp, Artificial Sequence
  Description of Artificial Sequence: Synthetic oligonucleotide
tttcagaataggaaccagtcct

SEQ ID NO: 8761 - DNA, 22 bp, Artificial Sequence
  Description of Artificial Sequence: Synthetic oligonucleotide
ataaatactgccacatgacgag

SEQ ID NO: 8762 - DNA, 22 bp, Artificial Sequence
  Description of Artificial Sequence: Synthetic oligonucleotide
ttatactgtgagtaatgagcca

SEQ ID NO: 8763 - DNA, 22 bp, Artificial Sequence
  Description of Artificial Sequence: Synthetic oligonucleotide
ttatttaccctgttcactggcc

SEQ ID NO: 8764 - DNA, 22 bp, Artificial Sequence
  Description of Artificial Sequence: Synthetic oligonucleotide
taaacatctcgggacaagccga

SEQ ID NO: 8765 - DNA, 22 bp, Artificial Sequence
  Description of Artificial Sequence: Synthetic oligonucleotide
ataagaagtgacttgggaagtt

SEQ ID NO: 8766 - DNA, 22 bp, Artificial Sequence
  Description of Artificial Sequence: Synthetic oligonucleotide
ttaactggaatccgaccctggc

SEQ ID NO: 8767 - DNA, 22 bp, Artificial Sequence
  Description of Artificial Sequence: Synthetic oligonucleotide
tttatcaatcaaattcttagaa

SEQ ID NO: 8768 - DNA, 22 bp, Artificial Sequence
  Description of Artificial Sequence: Synthetic oligonucleotide
taaatatagctgtttctgtctt

SEQ ID NO: 8769 - DNA, 22 bp, Artificial Sequence
  Description of Artificial Sequence: Synthetic oligonucleotide
tttcttccattcataatttcct

SEQ ID NO: 8770 - DNA, 22 bp, Artificial Sequence
  Description of Artificial Sequence: Synthetic oligonucleotide
atataaactaaagagtggaggt

SEQ ID NO: 8771 - DNA, 22 bp, Artificial Sequence
  Description of Artificial Sequence: Synthetic oligonucleotide
atagtggtaggaaatatctggg

SEQ ID NO: 8772 - DNA, 22 bp, Artificial Sequence
  Description of Artificial Sequence: Synthetic oligonucleotide
tattccagctggttagtgagct

SEQ ID NO: 8773 - DNA, 22 bp, Artificial Sequence
  Description of Artificial Sequence: Synthetic oligonucleotide
tttagacttcaaactcttaggc

SEQ ID NO: 8774 - DNA, 22 bp, Artificial Sequence
  Description of Artificial Sequence: Synthetic oligonucleotide
ttaatgctttgtactgtctggt

SEQ ID NO: 8775 - DNA, 22 bp, Artificial Sequence
  Description of Artificial Sequence: Synthetic oligonucleotide
ttctccttctgctttgaaagcc

SEQ ID NO: 8776 - DNA, 22 bp, Artificial Sequence
  Description of Artificial Sequence: Synthetic oligonucleotide
attctccttcacaaagagcgct

SEQ ID NO: 8777 - DNA, 22 bp, Artificial Sequence
  Description of Artificial Sequence: Synthetic oligonucleotide
ttaaccaaccaaagtatcttgc

SEQ ID NO: 8778 - DNA, 22 bp, Artificial Sequence
  Description of Artificial Sequence: Synthetic oligonucleotide
atagcagataatccaaattggt

SEQ ID NO: 8779 - DNA, 22 bp, Artificial Sequence
  Description of Artificial Sequence: Synthetic oligonucleotide
tttatgacaacatatgtaccct

SEQ ID NO: 8780 - DNA, 22 bp, Artificial Sequence
  Description of Artificial Sequence: Synthetic oligonucleotide
tacaaatacccttctctttcct

SEQ ID NO: 8781 - DNA, 22 bp, Artificial Sequence
  Description of Artificial Sequence: Synthetic oligonucleotide
ctacttaaagagaagctttggt

SEQ ID NO: 8782 - DNA, 22 bp, Artificial Sequence
  Description of Artificial Sequence: Synthetic oligonucleotide
ataacatcacactccagcaggc

SEQ ID NO: 8783 - DNA, 22 bp, Artificial Sequence
  Description of Artificial Sequence: Synthetic oligonucleotide
ataaagcacacaattgttccgg

SEQ ID NO: 8784 - DNA, 22 bp, Artificial Sequence
  Description of Artificial Sequence: Synthetic oligonucleotide
ttatacacaaactgaaacatgt

SEQ ID NO: 8785 - DNA, 22 bp, Artificial Sequence
  Description of Artificial Sequence: Synthetic oligonucleotide
ttatgaaacaacaattagactg

SEQ ID NO: 8786 - DNA, 22 bp, Artificial Sequence
  Description of Artificial Sequence: Synthetic oligonucleotide
atgtcataacaacttaattgca

SEQ ID NO: 8787 - DNA, 22 bp, Artificial Sequence
  Description of Artificial Sequence: Synthetic oligonucleotide
catctgttggagttcatgtcca

SEQ ID NO: 8788 - DNA, 22 bp, Artificial Sequence
  Description of Artificial Sequence: Synthetic oligonucleotide
tttgtgagttatttaaaggcct

SEQ ID NO: 8789 - DNA, 22 bp, Artificial Sequence
  Description of Artificial Sequence: Synthetic oligonucleotide
ataagggtcaacagacaatcgc

SEQ ID NO: 8790 - DNA, 22 bp, Artificial Sequence
  Description of Artificial Sequence: Synthetic oligonucleotide
atttctctgtatctgcttgggc

SEQ ID NO: 8791 - DNA, 22 bp, Artificial Sequence
  Description of Artificial Sequence: Synthetic oligonucleotide
ttaaatcatgctttaaagtcca

SEQ ID NO: 8792 - DNA, 22 bp, Artificial Sequence
  Description of Artificial Sequence: Synthetic oligonucleotide
tttatttagcacttgttcaggg

SEQ ID NO: 8793 - DNA, 22 bp, Artificial Sequence
  Description of Artificial Sequence: Synthetic oligonucleotide
atatttcaggaaaggcattgcc

SEQ ID NO: 8794 - DNA, 22 bp, Artificial Sequence
  Description of Artificial Sequence: Synthetic oligonucleotide
tttcaatatcaagttcgggccc

SEQ ID NO: 8795 - DNA, 22 bp, Artificial Sequence
  Description of Artificial Sequence: Synthetic oligonucleotide
ttatctctttaaatggaatcca

SEQ ID NO: 8796 - DNA, 22 bp, Artificial Sequence
  Description of Artificial Sequence: Synthetic oligonucleotide
tttcctaaataatttataacct

SEQ ID NO: 8797 - DNA, 22 bp, Artificial Sequence
  Description of Artificial Sequence: Synthetic oligonucleotide
ataacatcagagaaatcttggg

SEQ ID NO: 8798 - DNA, 22 bp, Artificial Sequence
  Description of Artificial Sequence: Synthetic oligonucleotide
tttagccgttcgatgatgcggt

SEQ ID NO: 8799 - DNA, 22 bp, Artificial Sequence
  Description of Artificial Sequence: Synthetic oligonucleotide
aatcacaagggagtggagagag

SEQ ID NO: 8800 - DNA, 22 bp, Artificial Sequence
  Description of Artificial Sequence: Synthetic oligonucleotide
ctatttagccgttcgatgatgc

SEQ ID NO: 8801 - DNA, 22 bp, Artificial Sequence
  Description of Artificial Sequence: Synthetic oligonucleotide
ttacctgaagaggatactggcc

SEQ ID NO: 8802 - DNA, 22 bp, Artificial Sequence
  Description of Artificial Sequence: Synthetic oligonucleotide
taaccgaaacagtttcacagtt

SEQ ID NO: 8803 - DNA, 22 bp, Artificial Sequence
  Description of Artificial Sequence: Synthetic oligonucleotide
attgaaattaacattattatga

SEQ ID NO: 8804 - DNA, 22 bp, Artificial Sequence
  Description of Artificial Sequence: Synthetic oligonucleotide
taaactcattggattcttctcc

SEQ ID NO: 8805 - DNA, 22 bp, Artificial Sequence
  Description of Artificial Sequence: Synthetic oligonucleotide
atagtaaataacaatttccttc

SEQ ID NO: 8806 - DNA, 22 bp, Artificial Sequence
  Description of Artificial Sequence: Synthetic oligonucleotide
atatcttacaagaaacaatgca

SEQ ID NO: 8807 - DNA, 22 bp, Artificial Sequence
  Description of Artificial Sequence: Synthetic oligonucleotide
ataaactcagtaattcattcac

SEQ ID NO: 8808 - DNA, 22 bp, Artificial Sequence
  Description of Artificial Sequence: Synthetic oligonucleotide
ttaacactgctgtgaatgtgct

SEQ ID NO: 8809 - DNA, 22 bp, Artificial Sequence
  Description of Artificial Sequence: Synthetic oligonucleotide
gatatactgcaggtcctgtcct

SEQ ID NO: 8810 - DNA, 22 bp, Artificial Sequence
  Description of Artificial Sequence: Synthetic oligonucleotide
tacaagaaacaatgcacatcct

SEQ ID NO: 8811 - DNA, 22 bp, Artificial Sequence
  Description of Artificial Sequence: Synthetic oligonucleotide
ataaataaagtgcaaccgtggg

SEQ ID NO: 8812 - DNA, 22 bp, Artificial Sequence
  Description of Artificial Sequence: Synthetic oligonucleotide
ttcattagagacattactctgt

SEQ ID NO: 8813 - DNA, 22 bp, Artificial Sequence
  Description of Artificial Sequence: Synthetic oligonucleotide
tttagaattaaggttcttccct

SEQ ID NO: 8814 - DNA, 22 bp, Artificial Sequence
  Description of Artificial Sequence: Synthetic oligonucleotide
aatcttaaaccttgactgactt

SEQ ID NO: 8815 - DNA, 22 bp, Artificial Sequence
  Description of Artificial Sequence: Synthetic oligonucleotide
ttaactcatgaggtggagccgt

SEQ ID NO: 8816 - DNA, 22 bp, Artificial Sequence
  Description of Artificial Sequence: Synthetic oligonucleotide
attctcaatgaaatgctttggc

SEQ ID NO: 8817 - DNA, 22 bp, Artificial Sequence
  Description of Artificial Sequence: Synthetic oligonucleotide
ttacctttgtatataatttgcc

SEQ ID NO: 8818 - DNA, 22 bp, Artificial Sequence
  Description of Artificial Sequence: Synthetic oligonucleotide
ttccattcagatcctcattcct

SEQ ID NO: 8819 - DNA, 22 bp, Artificial Sequence
  Description of Artificial Sequence: Synthetic oligonucleotide
ttcatttataggatcgatcctg

SEQ ID NO: 8820 - DNA, 22 bp, Artificial Sequence
  Description of Artificial Sequence: Synthetic oligonucleotide
tttataggatcgatcctgagcc

SEQ ID NO: 8821 - DNA, 22 bp, Artificial Sequence
  Description of Artificial Sequence: Synthetic oligonucleotide
aacgacaaatatagaataacct

SEQ ID NO: 8822 - DNA, 22 bp, Artificial Sequence
  Description of Artificial Sequence: Synthetic oligonucleotide
atcatgatccacagcttcccgt

SEQ ID NO: 8823 - DNA, 22 bp, Artificial Sequence
  Description of Artificial Sequence: Synthetic oligonucleotide
atgtagtagggcatgatggcca

SEQ ID NO: 8824 - DNA, 22 bp, Artificial Sequence
  Description of Artificial Sequence: Synthetic oligonucleotide
ggaaacaatcacagggactggc

SEQ ID NO: 8825 - DNA, 22 bp, Artificial Sequence
  Description of Artificial Sequence: Synthetic oligonucleotide
ttctgggttcttatccagggct

SEQ ID NO: 8826 - DNA, 22 bp, Artificial Sequence
  Description of Artificial Sequence: Synthetic oligonucleotide
atatgagtacacaggctgtgtc

SEQ ID NO: 8827 - DNA, 22 bp, Artificial Sequence
  Description of Artificial Sequence: Synthetic oligonucleotide
caatggtataccagaaggccgc

SEQ ID NO: 8828 - DNA, 22 bp, Artificial Sequence
  Description of Artificial Sequence: Synthetic oligonucleotide
aagaaactccaccttgtctggg

SEQ ID NO: 8829 - DNA, 22 bp, Artificial Sequence
  Description of Artificial Sequence: Synthetic oligonucleotide
ttgctaatatggatgaagccct

SEQ ID NO: 8830 - DNA, 22 bp, Artificial Sequence
  Description of Artificial Sequence: Synthetic oligonucleotide
gtgagcttgaagatacgcagga

SEQ ID NO: 8831 - DNA, 22 bp, Artificial Sequence
  Description of Artificial Sequence: Synthetic oligonucleotide
atctaagggcacattcacaggt

SEQ ID NO: 8832 - DNA, 22 bp, Artificial Sequence
  Description of Artificial Sequence: Synthetic oligonucleotide
gtacctcattcgtttctttggg

SEQ ID NO: 8833 - DNA, 22 bp, Artificial Sequence
  Description of Artificial Sequence: Synthetic oligonucleotide
atatcaggaggcccaattctct

SEQ ID NO: 8834 - DNA, 22 bp, Artificial Sequence
  Description of Artificial Sequence: Synthetic oligonucleotide
ggacacaatgacagggaccggt

SEQ ID NO: 8835 - DNA, 22 bp, Artificial Sequence
  Description of Artificial Sequence: Synthetic oligonucleotide
caagtcaatggcattgagtggg

SEQ ID NO: 8836 - DNA, 22 bp, Artificial Sequence
  Description of Artificial Sequence: Synthetic oligonucleotide
ttagaattgagtacaagtggtg

SEQ ID NO: 8837 - DNA, 22 bp, Artificial Sequence
  Description of Artificial Sequence: Synthetic oligonucleotide
caatgctctgagttcatgctgt

SEQ ID NO: 8838 - DNA, 22 bp, Artificial Sequence
  Description of Artificial Sequence: Synthetic oligonucleotide
ttaaagatgcgcaagatgcgca

SEQ ID NO: 8839 - DNA, 22 bp, Artificial Sequence
  Description of Artificial Sequence: Synthetic oligonucleotide
taaggtttgctaattctgccca

SEQ ID NO: 8840 - DNA, 22 bp, Artificial Sequence
  Description of Artificial Sequence: Synthetic oligonucleotide
tatttgcttcatagaattggca

SEQ ID NO: 8841 - DNA, 22 bp, Artificial Sequence
  Description of Artificial Sequence: Synthetic oligonucleotide
taaatctgcgaaatctgtacct

SEQ ID NO: 8842 - DNA, 22 bp, Artificial Sequence
  Description of Artificial Sequence: Synthetic oligonucleotide
tgtaaagataatatcgtggcct

SEQ ID NO: 8843 - DNA, 22 bp, Artificial Sequence
  Description of Artificial Sequence: Synthetic oligonucleotide
tttcattgagaaagcacaggcc

SEQ ID NO: 8844 - DNA, 22 bp, Artificial Sequence
  Description of Artificial Sequence: Synthetic oligonucleotide
atttcatagctgccattgtggc

SEQ ID NO: 8845 - DNA, 22 bp, Artificial Sequence
  Description of Artificial Sequence: Synthetic oligonucleotide
ttatgagtcatgcggattcggt

SEQ ID NO: 8846 - DNA, 22 bp, Artificial Sequence
  Description of Artificial Sequence: Synthetic oligonucleotide
ttaagaacgggaagaatgggtg

SEQ ID NO: 8847 - DNA, 22 bp, Artificial Sequence
  Description of Artificial Sequence: Synthetic oligonucleotide
taatagtaatttccaacatccc

SEQ ID NO: 8848 - DNA, 22 bp, Artificial Sequence
  Description of Artificial Sequence: Synthetic oligonucleotide
attaatgccttcagaataggct

SEQ ID NO: 8849 - DNA, 22 bp, Artificial Sequence
  Description of Artificial Sequence: Synthetic oligonucleotide
acaaccttgcagataaatacca

SEQ ID NO: 8850 - DNA, 22 bp, Artificial Sequence
  Description of Artificial Sequence: Synthetic oligonucleotide
tgaaagtgggagctaatgtcag

SEQ ID NO: 8851 - DNA, 22 bp, Artificial Sequence
  Description of Artificial Sequence: Synthetic oligonucleotide
ttcagcgacgacagcgagcggc

SEQ ID NO: 8852 - DNA, 22 bp, Artificial Sequence
  Description of Artificial Sequence: Synthetic oligonucleotide
atatgtgtacatatgtatacgg

SEQ ID NO: 8853 - DNA, 22 bp, Artificial Sequence
  Description of Artificial Sequence: Synthetic oligonucleotide
ttagccttgtagctgctgcgcc

SEQ ID NO: 8854 - DNA, 22 bp, Artificial Sequence
  Description of Artificial Sequence: Synthetic oligonucleotide
ttgtccaggaactctcgggcgt

SEQ ID NO: 8855 - DNA, 22 bp, Artificial Sequence
  Description of Artificial Sequence: Synthetic oligonucleotide
tttcttgatgaatttggcggca

SEQ ID NO: 8856 - DNA, 22 bp, Artificial Sequence
  Description of Artificial Sequence: Synthetic oligonucleotide
atgagtaatggaggtgtcccgt

SEQ ID NO: 8857 - DNA, 22 bp, Artificial Sequence
  Description of Artificial Sequence: Synthetic oligonucleotide
ataacagcagaaatacacagga

SEQ ID NO: 8858 - DNA, 22 bp, Artificial Sequence
  Description of Artificial Sequence: Synthetic oligonucleotide
taatagcttcacaatgttaggg

SEQ ID NO: 8859 - DNA, 22 bp, Artificial Sequence
  Description of Artificial Sequence: Synthetic oligonucleotide
atctagtaagagctcagaaggc

SEQ ID NO: 8860 - DNA, 22 bp, Artificial Sequence
  Description of Artificial Sequence: Synthetic oligonucleotide
tttcattcagatttacccagga

SEQ ID NO: 8861 - DNA, 22 bp, Artificial Sequence
  Description of Artificial Sequence: Synthetic oligonucleotide
gtagttgaggacattgtctcga

SEQ ID NO: 8862 - DNA, 22 bp, Artificial Sequence
  Description of Artificial Sequence: Synthetic oligonucleotide
caataatatcatattccctggc

SEQ ID NO: 8863 - DNA, 22 bp, Artificial Sequence
  Description of Artificial Sequence: Synthetic oligonucleotide
tttatgatggagtaggtcatgt

SEQ ID NO: 8864 - DNA, 22 bp, Artificial Sequence
  Description of Artificial Sequence: Synthetic oligonucleotide
ataggtgaccacgttctcccgt

SEQ ID NO: 8865 - DNA, 22 bp, Artificial Sequence
  Description of Artificial Sequence: Synthetic oligonucleotide
cttactaagctgttagtactgt

SEQ ID NO: 8866 - DNA, 22 bp, Artificial Sequence
  Description of Artificial Sequence: Synthetic oligonucleotide
attaaataaagtccacaaaggg

SEQ ID NO: 8867 - DNA, 22 bp, Artificial Sequence
  Description of Artificial Sequence: Synthetic oligonucleotide
tattccttggatactccaggct

SEQ ID NO: 8868 - DNA, 22 bp, Artificial Sequence
  Description of Artificial Sequence: Synthetic oligonucleotide
taacagattaggaagatgtgcc

SEQ ID NO: 8869 - DNA, 22 bp, Artificial Sequence
  Description of Artificial Sequence: Synthetic oligonucleotide
ctagaatttgaattgctgagcc

SEQ ID NO: 8870 - DNA, 22 bp, Artificial Sequence
  Description of Artificial Sequence: Synthetic oligonucleotide
ataaggcatatatgaaggctag

SEQ ID NO: 8871 - DNA, 22 bp, Artificial Sequence
  Description of Artificial Sequence: Synthetic oligonucleotide
catatatgaaggctagtgagct

SEQ ID NO: 8872 - DNA, 22 bp, Artificial Sequence
  Description of Artificial Sequence: Synthetic oligonucleotide
atagttgagcatcttgttaccc

SEQ ID NO: 8873 - DNA, 22 bp, Artificial Sequence
  Description of Artificial Sequence: Synthetic oligonucleotide
attacattcatcttaatgtgtg

SEQ ID NO: 8874 - DNA, 22 bp, Artificial Sequence
  Description of Artificial Sequence: Synthetic oligonucleotide
gaatgtcttgagatgggcacgt

SEQ ID NO: 8875 - DNA, 22 bp, Artificial Sequence
  Description of Artificial Sequence: Synthetic oligonucleotide
ttgacttgtccttatgttaggt

SEQ ID NO: 8876 - DNA, 22 bp, Artificial Sequence
  Description of Artificial Sequence: Synthetic oligonucleotide
ttcagatgtccattcagcaggt

SEQ ID NO: 8877 - DNA, 22 bp, Artificial Sequence
  Description of Artificial Sequence: Synthetic oligonucleotide
aatgaatgcgattgatcgactt

SEQ ID NO: 8878 - DNA, 22 bp, Artificial Sequence
  Description of Artificial Sequence: Synthetic oligonucleotide
ttgcttctttatatgacctgcc

SEQ ID NO: 8879 - DNA, 22 bp, Artificial Sequence
  Description of Artificial Sequence: Synthetic oligonucleotide
atttgttccatgcatctcactc

SEQ ID NO: 8880 - DNA, 22 bp, Artificial Sequence
  Description of Artificial Sequence: Synthetic oligonucleotide
taaacccttgaaggttacttcc

SEQ ID NO: 8881 - DNA, 22 bp, Artificial Sequence
  Description of Artificial Sequence: Synthetic oligonucleotide
tatctccttgaccatttccctt

SEQ ID NO: 8882 - DNA, 22 bp, Artificial Sequence
  Description of Artificial Sequence: Synthetic oligonucleotide
taaataatgatgcttctctgcc

SEQ ID NO: 8883 - DNA, 22 bp, Artificial Sequence
  Description of Artificial Sequence: Synthetic oligonucleotide
ttattaccactttatctacccg

SEQ ID NO: 8884 - DNA, 22 bp, Artificial Sequence
  Description of Artificial Sequence: Synthetic oligonucleotide
tatttctagtgcactatagccc

SEQ ID NO: 8885 - DNA, 22 bp, Artificial Sequence
  Description of Artificial Sequence: Synthetic oligonucleotide
tcatagtaccagttggtgaggg

SEQ ID NO: 8886 - DNA, 22 bp, Artificial Sequence
  Description of Artificial Sequence: Synthetic oligonucleotide
tttcacttgcacagtggtggcg

SEQ ID NO: 8887 - DNA, 22 bp, Artificial Sequence
  Description of Artificial Sequence: Synthetic oligonucleotide
tttattaaatatggtgcaagct

SEQ ID NO: 8888 - DNA, 22 bp, Artificial Sequence
  Description of Artificial Sequence: Synthetic oligonucleotide
tttcctaaacaggacggaggtg

SEQ ID NO: 8889 - DNA, 22 bp, Artificial Sequence
  Description of Artificial Sequence: Synthetic oligonucleotide
tatcagtctgatgttgagagga

SEQ ID NO: 8890 - DNA, 22 bp, Artificial Sequence
  Description of Artificial Sequence: Synthetic oligonucleotide
atctcattccgggtattccgga

SEQ ID NO: 8891 - DNA, 22 bp, Artificial Sequence
  Description of Artificial Sequence: Synthetic oligonucleotide
ttatcctagctcttgtctgggc

SEQ ID NO: 8892 - DNA, 22 bp, Artificial Sequence
  Description of Artificial Sequence: Synthetic oligonucleotide
atcaatgggaacattggctggg

SEQ ID NO: 8893 - DNA, 22 bp, Artificial Sequence
  Description of Artificial Sequence: Synthetic oligonucleotide
gatgatcacccgctggtttcct

SEQ ID NO: 8894 - DNA, 22 bp, Artificial Sequence
  Description of Artificial Sequence: Synthetic oligonucleotide
gatgaggaagatatgaggtcct

SEQ ID NO: 8895 - DNA, 22 bp, Artificial Sequence
  Description of Artificial Sequence: Synthetic oligonucleotide
ttagaagaggatttgctgaggt

SEQ ID NO: 8896 - DNA, 22 bp, Artificial Sequence
  Description of Artificial Sequence: Synthetic oligonucleotide
aattaggatgatatttaggcac

SEQ ID NO: 8897 - DNA, 22 bp, Artificial Sequence
  Description of Artificial Sequence: Synthetic oligonucleotide
ataggtttccagattatttgga

SEQ ID NO: 8898 - DNA, 22 bp, Artificial Sequence
  Description of Artificial Sequence: Synthetic oligonucleotide
ttaaagttcgagggagaagttc

SEQ ID NO: 8899 - DNA, 22 bp, Artificial Sequence
  Description of Artificial Sequence: Synthetic oligonucleotide
atttagaaagagccaattgcaa

SEQ ID NO: 8900 - DNA, 22 bp, Artificial Sequence
  Description of Artificial Sequence: Synthetic oligonucleotide
ctcttatatcagggaatgtccc

SEQ ID NO: 8901 - DNA, 22 bp, Artificial Sequence
  Description of Artificial Sequence: Synthetic oligonucleotide
tttggttaacacaaagaagcgg

SEQ ID NO: 8902 - DNA, 22 bp, Artificial Sequence
  Description of Artificial Sequence: Synthetic oligonucleotide
atttctcctgggatgttctgct

SEQ ID NO: 8903 - DNA, 22 bp, Artificial Sequence
  Description of Artificial Sequence: Synthetic oligonucleotide
tataattgaggtccatatcccg

SEQ ID NO: 8904 - DNA, 22 bp, Artificial Sequence
  Description of Artificial Sequence: Synthetic oligonucleotide
taattgaggtccatatcccggc

SEQ ID NO: 8905 - DNA, 22 bp, Artificial Sequence
  Description of Artificial Sequence: Synthetic oligonucleotide
aacttcttgggtgatatgggcg

SEQ ID NO: 8906 - DNA, 22 bp, Artificial Sequence
  Description of Artificial Sequence: Synthetic oligonucleotide
taagatgctcttctggaagccc

SEQ ID NO: 8907 - DNA, 22 bp, Artificial Sequence
  Description of Artificial Sequence: Synthetic oligonucleotide
tttgagtagcattgtgaatgct

SEQ ID NO: 8908 - DNA, 22 bp, Artificial Sequence
  Description of Artificial Sequence: Synthetic oligonucleotide
atataatttctgccaagaacga

SEQ ID NO: 8909 - DNA, 22 bp, Artificial Sequence
  Description of Artificial Sequence: Synthetic oligonucleotide
ataattgaggtccatatcccgg

SEQ ID NO: 8910 - DNA, 22 bp, Artificial Sequence
  Description of Artificial Sequence: Synthetic oligonucleotide
ttagctttaaagtcaaactggt

SEQ ID NO: 8911 - DNA, 22 bp, Artificial Sequence
  Description of Artificial Sequence: Synthetic oligonucleotide
ctactagaggaacaaactggcc

SEQ ID NO: 8912 - DNA, 22 bp, Artificial Sequence
  Description of Artificial Sequence: Synthetic oligonucleotide
tactactagaggaacaaactgg

SEQ ID NO: 8913 - DNA, 22 bp, Artificial Sequence
  Description of Artificial Sequence: Synthetic oligonucleotide
tcagatctcaagacagactctt

SEQ ID NO: 8914 - DNA, 22 bp, Artificial Sequence
  Description of Artificial Sequence: Synthetic oligonucleotide
ttgaagctgcaggtattcaggt

SEQ ID NO: 8915 - DNA, 22 bp, Artificial Sequence
  Description of Artificial Sequence: Synthetic oligonucleotide
tttcgctttcgaatgtcctggt

SEQ ID NO: 8916 - DNA, 22 bp, Artificial Sequence
  Description of Artificial Sequence: Synthetic oligonucleotide
ttaagttatccaatgaaatgga

SEQ ID NO: 8917 - DNA, 22 bp, Artificial Sequence
  Description of Artificial Sequence: Synthetic oligonucleotide
atctgtaatgggatgcttggtg

SEQ ID NO: 8918 - DNA, 22 bp, Artificial Sequence
  Description of Artificial Sequence: Synthetic oligonucleotide
aatgttcccacggagatcagga

SEQ ID NO: 8919 - DNA, 22 bp, Artificial Sequence
  Description of Artificial Sequence: Synthetic oligonucleotide
aatatatgacgtattgttcctg

SEQ ID NO: 8920 - DNA, 22 bp, Artificial Sequence
  Description of Artificial Sequence: Synthetic oligonucleotide
agaaacaataagagatgacctg

SEQ ID NO: 8921 - DNA, 22 bp, Artificial Sequence
  Description of Artificial Sequence: Synthetic oligonucleotide
atactctactccatcagttccc

SEQ ID NO: 8922 - DNA, 22 bp, Artificial Sequence
  Description of Artificial Sequence: Synthetic oligonucleotide
ataaataaccagattctgctaa

SEQ ID NO: 8923 - DNA, 22 bp, Artificial Sequence
  Description of Artificial Sequence: Synthetic oligonucleotide
gtaacatgtgagattgaattgt

SEQ ID NO: 8924 - DNA, 22 bp, Artificial Sequence
  Description of Artificial Sequence: Synthetic oligonucleotide
ataaccacacaaagtgaagccg

SEQ ID NO: 8925 - DNA, 22 bp, Artificial Sequence
  Description of Artificial Sequence: Synthetic oligonucleotide
agaagtgatgctttcatgtgct

SEQ ID NO: 8926 - DNA, 22 bp, Artificial Sequence
  Description of Artificial Sequence: Synthetic oligonucleotide
ttactgaagtagcaagtgccta

SEQ ID NO: 8927 - DNA, 22 bp, Artificial Sequence
  Description of Artificial Sequence: Synthetic oligonucleotide
gtttaagctcagataactacca

SEQ ID NO: 8928 - DNA, 22 bp, Artificial Sequence
  Description of Artificial Sequence: Synthetic oligonucleotide
ttaaaggagaagagggagaggc

SEQ ID NO: 8929 - DNA, 22 bp, Artificial Sequence
  Description of Artificial Sequence: Synthetic oligonucleotide
ttcagtgatcatacagagaggg

SEQ ID NO: 8930 - DNA, 22 bp, Artificial Sequence
  Description of Artificial Sequence: Synthetic oligonucleotide
ttaaatgtccagatggagtggc

SEQ ID NO: 8931 - DNA, 22 bp, Artificial Sequence
  Description of Artificial Sequence: Synthetic oligonucleotide
taatagatggatgatgtttggg

SEQ ID NO: 8932 - DNA, 22 bp, Artificial Sequence
  Description of Artificial Sequence: Synthetic oligonucleotide
atcttcataaattacatcagga

SEQ ID NO: 8933 - DNA, 22 bp, Artificial Sequence
  Description of Artificial Sequence: Synthetic oligonucleotide
aatgtttcctagacaaactcgt

SEQ ID NO: 8934 - DNA, 22 bp, Artificial Sequence
  Description of Artificial Sequence: Synthetic oligonucleotide
aattacatcaggataatttggg

SEQ ID NO: 8935 - DNA, 22 bp, Artificial Sequence
  Description of Artificial Sequence: Synthetic oligonucleotide
attaggaaccggatcacctgcc

SEQ ID NO: 8936 - DNA, 22 bp, Artificial Sequence
  Description of Artificial Sequence: Synthetic oligonucleotide
tttcagaaatgctttatgagcc

SEQ ID NO: 8937 - DNA, 22 bp, Artificial Sequence
  Description of Artificial Sequence: Synthetic oligonucleotide
tttcaatgacagggatcttggt

SEQ ID NO: 8938 - DNA, 22 bp, Artificial Sequence
  Description of Artificial Sequence: Synthetic oligonucleotide
ttactgatctcgatgaaatggc

SEQ ID NO: 8939 - DNA, 22 bp, Artificial Sequence
  Description of Artificial Sequence: Synthetic oligonucleotide
tttaattaggtccttacgtgtt

SEQ ID NO: 8940 - DNA, 22 bp, Artificial Sequence
  Description of Artificial Sequence: Synthetic oligonucleotide
accattcaggaaataaagacag

SEQ ID NO: 8941 - DNA, 22 bp, Artificial Sequence
  Description of Artificial Sequence: Synthetic oligonucleotide
ttcaggaaataaagacagggcg

SEQ ID NO: 8942 - DNA, 22 bp, Artificial Sequence
  Description of Artificial Sequence: Synthetic oligonucleotide
aatatatgcccagtagtgccca

SEQ ID NO: 8943 - DNA, 22 bp, Artificial Sequence
  Description of Artificial Sequence: Synthetic oligonucleotide
ttcagctttcatttggaaggca

SEQ ID NO: 8944 - DNA, 22 bp, Artificial Sequence
  Description of Artificial Sequence: Synthetic oligonucleotide
atgagatacatagttgtttccc

SEQ ID NO: 8945 - DNA, 22 bp, Artificial Sequence
  Description of Artificial Sequence: Synthetic oligonucleotide
tattgccaacattctttagccc

SEQ ID NO: 8946 - DNA, 22 bp, Artificial Sequence
  Description of Artificial Sequence: Synthetic oligonucleotide
atatgaaggtaacttcggtggc

SEQ ID NO: 8947 - DNA, 22 bp, Artificial Sequence
  Description of Artificial Sequence: Synthetic oligonucleotide
tttcaacaaccacttgaatccc

SEQ ID NO: 8948 - DNA, 22 bp, Artificial Sequence
  Description of Artificial Sequence: Synthetic oligonucleotide
taatgtcagcccaatatttgtg

SEQ ID NO: 8949 - DNA, 22 bp, Artificial Sequence
  Description of Artificial Sequence: Synthetic oligonucleotide
tttggtgatctcctctagagcg

SEQ ID NO: 8950 - DNA, 22 bp, Artificial Sequence
  Description of Artificial Sequence: Synthetic oligonucleotide
cttcagcagaagtgtcaggtgg

SEQ ID NO: 8951 - DNA, 22 bp, Artificial Sequence
  Description of Artificial Sequence: Synthetic oligonucleotide
ttatcttgtgatgtgatagctg

SEQ ID NO: 8952 - DNA, 22 bp, Artificial Sequence
  Description of Artificial Sequence: Synthetic oligonucleotide
aatcacactgaagtggtggctg

SEQ ID NO: 8953 - DNA, 22 bp, Artificial Sequence
  Description of Artificial Sequence: Synthetic oligonucleotide
gaataaattaaagtactctcca

SEQ ID NO: 8954 - DNA, 22 bp, Artificial Sequence
  Description of Artificial Sequence: Synthetic oligonucleotide
ctagttacaaattgtcttggcc

SEQ ID NO: 8955 - DNA, 22 bp, Artificial Sequence
  Description of Artificial Sequence: Synthetic oligonucleotide
atatagttcttggctaggcgca

SEQ ID NO: 8956 - DNA, 22 bp, Artificial Sequence
  Description of Artificial Sequence: Synthetic oligonucleotide
tttctctataaggtatcaggtg

SEQ ID NO: 8957 - DNA, 22 bp, Artificial Sequence
  Description of Artificial Sequence: Synthetic oligonucleotide
tttaactatgacatccctggag

SEQ ID NO: 8958 - DNA, 22 bp, Artificial Sequence
  Description of Artificial Sequence: Synthetic oligonucleotide
gtaaactgtcgcataagagcct

SEQ ID NO: 8959 - DNA, 22 bp, Artificial Sequence
  Description of Artificial Sequence: Synthetic oligonucleotide
tttactcttgaacttctgggca

SEQ ID NO: 8960 - DNA, 22 bp, Artificial Sequence
  Description of Artificial Sequence: Synthetic oligonucleotide
ttcaataaagatgcagcctgca

SEQ ID NO: 8961 - DNA, 22 bp, Artificial Sequence
  Description of Artificial Sequence: Synthetic oligonucleotide
aatcatgaacaagtgcttcctg

SEQ ID NO: 8962 - DNA, 22 bp, Artificial Sequence
  Description of Artificial Sequence: Synthetic oligonucleotide
atgctgagacatatactgggcc

SEQ ID NO: 8963 - DNA, 22 bp, Artificial Sequence
  Description of Artificial Sequence: Synthetic oligonucleotide
tttaggtatcgtgccatttcac

SEQ ID NO: 8964 - DNA, 22 bp, Artificial Sequence
  Description of Artificial Sequence: Synthetic oligonucleotide
atcagataggagctggtctgta

SEQ ID NO: 8965 - DNA, 22 bp, Artificial Sequence
  Description of Artificial Sequence: Synthetic oligonucleotide
ttatctgggaaggccgaactgc

SEQ ID NO: 8966 - DNA, 22 bp, Artificial Sequence
  Description of Artificial Sequence: Synthetic oligonucleotide
aagaggatgaagtcacgtcggg

SEQ ID NO: 8967 - DNA, 22 bp, Artificial Sequence
  Description of Artificial Sequence: Synthetic oligonucleotide
ttaatccaggctagaaagacgt

SEQ ID NO: 8968 - DNA, 22 bp, Artificial Sequence
  Description of Artificial Sequence: Synthetic oligonucleotide
gtgacatttgggaaggtgtcct

SEQ ID NO: 8969 - DNA, 22 bp, Artificial Sequence
  Description of Artificial Sequence: Synthetic oligonucleotide
ctatctctggagctaaagcggc

SEQ ID NO: 8970 - DNA, 22 bp, Artificial Sequence
  Description of Artificial Sequence: Synthetic oligonucleotide
atatgagtaaactttctggcca

SEQ ID NO: 8971 - DNA, 22 bp, Artificial Sequence
  Description of Artificial Sequence: Synthetic oligonucleotide
ataaagactccgagccactctg

SEQ ID NO: 8972 - DNA, 22 bp, Artificial Sequence
  Description of Artificial Sequence: Synthetic oligonucleotide
taactgattcatcaagagagtc

SEQ ID NO: 8973 - DNA, 22 bp, Artificial Sequence
  Description of Artificial Sequence: Synthetic oligonucleotide
tatactaaagacaaaggcagct

SEQ ID NO: 8974 - DNA, 22 bp, Artificial Sequence
  Description of Artificial Sequence: Synthetic oligonucleotide
ttcatatctgacacggtccgcc

SEQ ID NO: 8975 - DNA, 22 bp, Artificial Sequence
  Description of Artificial Sequence: Synthetic oligonucleotide
ttatggaagcattgctggcccg

SEQ ID NO: 8976 - DNA, 22 bp, Artificial Sequence
  Description of Artificial Sequence: Synthetic oligonucleotide
atatagtcactcttggagccga

SEQ ID NO: 8977 - DNA, 22 bp, Artificial Sequence
  Description of Artificial Sequence: Synthetic oligonucleotide
tttgagaaagagaggtagagcc

SEQ ID NO: 8978 - DNA, 22 bp, Artificial Sequence
  Description of Artificial Sequence: Synthetic oligonucleotide
ttatattactgatctggtcctg

SEQ ID NO: 8979 - DNA, 22 bp, Artificial Sequence
  Description of Artificial Sequence: Synthetic oligonucleotide
ttaagaaaggcaagaacctgac

SEQ ID NO: 8980 - DNA, 22 bp, Artificial Sequence
  Description of Artificial Sequence: Synthetic oligonucleotide
atataagatattccacttgcct

SEQ ID NO: 8981 - DNA, 22 bp, Artificial Sequence
  Description of Artificial Sequence: Synthetic oligonucleotide
attactgatctggtcctgggtc

SEQ ID NO: 8982 - DNA, 22 bp, Artificial Sequence
  Description of Artificial Sequence: Synthetic oligonucleotide
taagatattccacttgcctcca

SEQ ID NO: 8983 - DNA, 22 bp, Artificial Sequence
  Description of Artificial Sequence: Synthetic oligonucleotide
attgatgaagaggtccttgctg

SEQ ID NO: 8984 - DNA, 22 bp, Artificial Sequence
  Description of Artificial Sequence: Synthetic oligonucleotide
atatagagggtgatgatgtcac

SEQ ID NO: 8985 - DNA, 22 bp, Artificial Sequence
  Description of Artificial Sequence: Synthetic oligonucleotide
tacttcttgcagtaagcctcca

SEQ ID NO: 8986 - DNA, 22 bp, Artificial Sequence
  Description of Artificial Sequence: Synthetic oligonucleotide
tcaatgacagagaaggtgccgg

SEQ ID NO: 8987 - DNA, 22 bp, Artificial Sequence
  Description of Artificial Sequence: Synthetic oligonucleotide
ttaatgtgcagagctatgtccc

SEQ ID NO: 8988 - DNA, 22 bp, Artificial Sequence
  Description of Artificial Sequence: Synthetic oligonucleotide
ttaaacttactgttgaagccct

SEQ ID NO: 8989 - DNA, 22 bp, Artificial Sequence
  Description of Artificial Sequence: Synthetic oligonucleotide
ttaagatttgctctactacgga

SEQ ID NO: 8990 - DNA, 22 bp, Artificial Sequence
  Description of Artificial Sequence: Synthetic oligonucleotide
tttacgatgaacataaagtcct

SEQ ID NO: 8991 - DNA, 22 bp, Artificial Sequence
  Description of Artificial Sequence: Synthetic oligonucleotide
ttctttgatcaggatttcggct

SEQ ID NO: 8992 - DNA, 22 bp, Artificial Sequence
  Description of Artificial Sequence: Synthetic oligonucleotide
ttcttcagtgctttgatggcgt

SEQ ID NO: 8993 - DNA, 22 bp, Artificial Sequence
  Description of Artificial Sequence: Synthetic oligonucleotide
ataggaaatcagttagcagctg

SEQ ID NO: 8994 - DNA, 22 bp, Artificial Sequence
  Description of Artificial Sequence: Synthetic oligonucleotide
ttcacatatgggttagagcgct

SEQ ID NO: 8995 - DNA, 22 bp, Artificial Sequence
  Description of Artificial Sequence: Synthetic oligonucleotide
ataaactagattatacacagaa

SEQ ID NO: 8996 - DNA, 22 bp, Artificial Sequence
  Description of Artificial Sequence: Synthetic oligonucleotide
aagaatgaacacattcctcgtg

SEQ ID NO: 8997 - DNA, 22 bp, Artificial Sequence
  Description of Artificial Sequence: Synthetic oligonucleotide
gtattgaacctctaataggcca

SEQ ID NO: 8998 - DNA, 22 bp, Artificial Sequence
  Description of Artificial Sequence: Synthetic oligonucleotide
aatctccatggcaataatagga

SEQ ID NO: 8999 - DNA, 22 bp, Artificial Sequence
  Description of Artificial Sequence: Synthetic oligonucleotide
taaatgtcccaacctgtgactt

SEQ ID NO: 9000 - DNA, 22 bp, Artificial Sequence
  Description of Artificial Sequence: Synthetic oligonucleotide
gtgataaatcggacaatgtggt

SEQ ID NO: 9001 - DNA, 22 bp, Artificial Sequence
  Description of Artificial Sequence: Synthetic oligonucleotide
gataaatcggacaatgtggtcg

SEQ ID NO: 9002 - DNA, 22 bp, Artificial Sequence
  Description of Artificial Sequence: Synthetic oligonucleotide
tacattgatgacacataaactg

SEQ ID NO: 9003 - DNA, 22 bp, Artificial Sequence
  Description of Artificial Sequence: Synthetic oligonucleotide
agtaaatatcagctcgtcggag

SEQ ID NO: 9004 - DNA, 22 bp, Artificial Sequence
  Description of Artificial Sequence: Synthetic oligonucleotide
tttatctccaagagcttgtcgg

SEQ ID NO: 9005 - DNA, 22 bp, Artificial Sequence
  Description of Artificial Sequence: Synthetic oligonucleotide
ttatctcaacctcttgtttggt

SEQ ID NO: 9006 - DNA, 22 bp, Artificial Sequence
  Description of Artificial Sequence: Synthetic oligonucleotide
aatatatgtgggctcaaaggca

SEQ ID NO: 9007 - DNA, 22 bp, Artificial Sequence
  Description of Artificial Sequence: Synthetic oligonucleotide
ttagtgaactcattcattagcc

SEQ ID NO: 9008 - DNA, 22 bp, Artificial Sequence
  Description of Artificial Sequence: Synthetic oligonucleotide
atagctgtaatatccaggtggc

SEQ ID NO: 9009 - DNA, 22 bp, Artificial Sequence
  Description of Artificial Sequence: Synthetic oligonucleotide
taaaggtataatgtcattacag

SEQ ID NO: 9010 - DNA, 22 bp, Artificial Sequence
  Description of Artificial Sequence: Synthetic oligonucleotide
atagtgtataattgtgcagtcc

SEQ ID NO: 9011 - DNA, 22 bp, Artificial Sequence
  Description of Artificial Sequence: Synthetic oligonucleotide
atttcatgaagtcttatcagac

SEQ ID NO: 9012 - DNA, 22 bp, Artificial Sequence
  Description of Artificial Sequence: Synthetic oligonucleotide
tataatgaagccacatgcggcc

SEQ ID NO: 9013 - DNA, 22 bp, Artificial Sequence
  Description of Artificial Sequence: Synthetic oligonucleotide
attactcttcacaatcatggtt

SEQ ID NO: 9014 - DNA, 22 bp, Artificial Sequence
  Description of Artificial Sequence: Synthetic oligonucleotide
tattcacagaaattaagctggt

SEQ ID NO: 9015 - DNA, 22 bp, Artificial Sequence
  Description of Artificial Sequence: Synthetic oligonucleotide
atacataattatttgacgagtg

SEQ ID NO: 9016 - DNA, 22 bp, Artificial Sequence
  Description of Artificial Sequence: Synthetic oligonucleotide
tttataaatcaggtttaaggct

SEQ ID NO: 9017 - DNA, 22 bp, Artificial Sequence
  Description of Artificial Sequence: Synthetic oligonucleotide
tttcatggacacattatgtgca

SEQ ID NO: 9018 - DNA, 22 bp, Artificial Sequence
  Description of Artificial Sequence: Synthetic oligonucleotide
tttcctaacaaaggcctgggca

SEQ ID NO: 9019 - DNA, 22 bp, Artificial Sequence
  Description of Artificial Sequence: Synthetic oligonucleotide
tatctgctgggaattatcaccg

SEQ ID NO: 9020 - DNA, 22 bp, Artificial Sequence
  Description of Artificial Sequence: Synthetic oligonucleotide
tttacaattaataaagagatgg

SEQ ID NO: 9021 - DNA, 22 bp, Artificial Sequence
  Description of Artificial Sequence: Synthetic oligonucleotide
atattcttggtgtttacccgcc

SEQ ID NO: 9022 - DNA, 22 bp, Artificial Sequence
  Description of Artificial Sequence: Synthetic oligonucleotide
ttgaagaagggtaatgtggcat

SEQ ID NO: 9023 - DNA, 22 bp, Artificial Sequence
  Description of Artificial Sequence: Synthetic oligonucleotide
taagtacctggtctgctctctt

SEQ ID NO: 9024 - DNA, 22 bp, Artificial Sequence
  Description of Artificial Sequence: Synthetic oligonucleotide
caaataggagatttatcctcgt

SEQ ID NO: 9025 - DNA, 22 bp, Artificial Sequence
  Description of Artificial Sequence: Synthetic oligonucleotide
tcataggacatgtctataggaa

SEQ ID NO: 9026 - DNA, 22 bp, Artificial Sequence
  Description of Artificial Sequence: Synthetic oligonucleotide
taatatccaccttacgtcaggg

SEQ ID NO: 9027 - DNA, 22 bp, Artificial Sequence
  Description of Artificial Sequence: Synthetic oligonucleotide
ttaggatatatgaacatgtggc

SEQ ID NO: 9028 - DNA, 22 bp, Artificial Sequence
  Description of Artificial Sequence: Synthetic oligonucleotide
atatctcttctgagaaggagtt

SEQ ID NO: 9029 - DNA, 22 bp, Artificial Sequence
  Description of Artificial Sequence: Synthetic oligonucleotide
attcttaacagaataataagtc

SEQ ID NO: 9030 - DNA, 22 bp, Artificial Sequence
  Description of Artificial Sequence: Synthetic oligonucleotide
tttagatcacgtacataacgag

SEQ ID NO: 9031 - DNA, 22 bp, Artificial Sequence
  Description of Artificial Sequence: Synthetic oligonucleotide
tacttcgatcccattcatggcg

SEQ ID NO: 9032 - DNA, 22 bp, Artificial Sequence
  Description of Artificial Sequence: Synthetic oligonucleotide
tttcctcgaaagtctcggagct

SEQ ID NO: 9033 - DNA, 22 bp, Artificial Sequence
  Description of Artificial Sequence: Synthetic oligonucleotide
atatatagaggtgtagagagct

SEQ ID NO: 9034 - DNA, 22 bp, Artificial Sequence
  Description of Artificial Sequence: Synthetic oligonucleotide
gtacatcttgggtgtgtcccgc

SEQ ID NO: 9035 - DNA, 22 bp, Artificial Sequence
  Description of Artificial Sequence: Synthetic oligonucleotide
taatatatagaggtgtagagag

SEQ ID NO: 9036 - DNA, 22 bp, Artificial Sequence
  Description of Artificial Sequence: Synthetic oligonucleotide
gtaagtaatcaaatcctttggt

SEQ ID NO: 9037 - DNA, 22 bp, Artificial Sequence
  Description of Artificial Sequence: Synthetic oligonucleotide
cttgatcagaacttcatcatcc

SEQ ID NO: 9038 - DNA, 22 bp, Artificial Sequence
  Description of Artificial Sequence: Synthetic oligonucleotide
tacaactaagaacttaaacgag

SEQ ID NO: 9039 - DNA, 22 bp, Artificial Sequence
  Description of Artificial Sequence: Synthetic oligonucleotide
tataaataagaaaggccaacca

SEQ ID NO: 9040 - DNA, 22 bp, Artificial Sequence
  Description of Artificial Sequence: Synthetic oligonucleotide
gtatactcagtgcctgtagggc

SEQ ID NO: 9041 - DNA, 22 bp, Artificial Sequence
  Description of Artificial Sequence: Synthetic oligonucleotide
ttgattgtttagttgctgcctg

SEQ ID NO: 9042 - DNA, 22 bp, Artificial Sequence
  Description of Artificial Sequence: Synthetic oligonucleotide
ttcaccttcttgatcatctcct

SEQ ID NO: 9043 - DNA, 22 bp, Artificial Sequence
  Description of Artificial Sequence: Synthetic oligonucleotide
gtaaggaaatatatcctttggt

SEQ ID NO: 9044 - DNA, 22 bp, Artificial Sequence
  Description of Artificial Sequence: Synthetic oligonucleotide
tcagatgatgcatttgattgtt

SEQ ID NO: 9045 - DNA, 22 bp, Artificial Sequence
  Description of Artificial Sequence: Synthetic oligonucleotide
ttaatctgaacagcaatgaggg

SEQ ID NO: 9046 - DNA, 22 bp, Artificial Sequence
  Description of Artificial Sequence: Synthetic oligonucleotide
ttcatctcggtaataaacagga

SEQ ID NO: 9047 - DNA, 22 bp, Artificial Sequence
  Description of Artificial Sequence: Synthetic oligonucleotide
tcatactttaatacagcagctt

SEQ ID NO: 9048 - DNA, 22 bp, Artificial Sequence
  Description of Artificial Sequence: Synthetic oligonucleotide
atttacagtcagcttggccgac

SEQ ID NO: 9049 - DNA, 22 bp, Artificial Sequence
  Description of Artificial Sequence: Synthetic oligonucleotide
tttgtgttcaagtaagagagcc

SEQ ID NO: 9050 - DNA, 22 bp, Artificial Sequence
  Description of Artificial Sequence: Synthetic oligonucleotide
tttacattcctgcttaaaggta

SEQ ID NO: 9051 - DNA, 22 bp, Artificial Sequence
  Description of Artificial Sequence: Synthetic oligonucleotide
ttctctctccgaaggatggcag

SEQ ID NO: 9052 - DNA, 22 bp, Artificial Sequence
  Description of Artificial Sequence: Synthetic oligonucleotide
atagatgacaggacatttcggg

SEQ ID NO: 9053 - DNA, 22 bp, Artificial Sequence
  Description of Artificial Sequence: Synthetic oligonucleotide
ttactttgagctttcagatcct

SEQ ID NO: 9054 - DNA, 22 bp, Artificial Sequence
  Description of Artificial Sequence: Synthetic oligonucleotide
ttatggactagtgtagtctggg

SEQ ID NO: 9055 - DNA, 22 bp, Artificial Sequence
  Description of Artificial Sequence: Synthetic oligonucleotide
cttatcaatgatcttcacggca

SEQ ID NO: 9056 - DNA, 22 bp, Artificial Sequence
  Description of Artificial Sequence: Synthetic oligonucleotide
ttcttaaggaccttcatggcgt

SEQ ID NO: 9057 - DNA, 22 bp, Artificial Sequence
  Description of Artificial Sequence: Synthetic oligonucleotide
gaaatctgtgatcttaatgtgc

SEQ ID NO: 9058 - DNA, 22 bp, Artificial Sequence
  Description of Artificial Sequence: Synthetic oligonucleotide
cctcattatcacgtcgaggccg

SEQ ID NO: 9059 - DNA, 22 bp, Artificial Sequence
  Description of Artificial Sequence: Synthetic oligonucleotide
attcttcaggtctgtactgggc

SEQ ID NO: 9060 - DNA, 22 bp, Artificial Sequence
  Description of Artificial Sequence: Synthetic oligonucleotide
tattggttccagtttgattgct

SEQ ID NO: 9061 - DNA, 22 bp, Artificial Sequence
  Description of Artificial Sequence: Synthetic oligonucleotide
ctattgtaacaatttcgttggt

SEQ ID NO: 9062 - DNA, 22 bp, Artificial Sequence
  Description of Artificial Sequence: Synthetic oligonucleotide
ttcagcaaggagtcaaagactt

SEQ ID NO: 9063 - DNA, 22 bp, Artificial Sequence
  Description of Artificial Sequence: Synthetic oligonucleotide
ttcttgaacgattctattgcca

SEQ ID NO: 9064 - DNA, 22 bp, Artificial Sequence
  Description of Artificial Sequence: Synthetic oligonucleotide
ttagccacagaaagcatcgggc

SEQ ID NO: 9065 - DNA, 22 bp, Artificial Sequence
  Description of Artificial Sequence: Synthetic oligonucleotide
attcctcataagacacagtggc

SEQ ID NO: 9066 - DNA, 22 bp, Artificial Sequence
  Description of Artificial Sequence: Synthetic oligonucleotide
tttagtttggatatccaccctc

SEQ ID NO: 9067 - DNA, 22 bp, Artificial Sequence
  Description of Artificial Sequence: Synthetic oligonucleotide
gtaatacacctgtgggagacct

SEQ ID NO: 9068 - DNA, 22 bp, Artificial Sequence
  Description of Artificial Sequence: Synthetic oligonucleotide
ttactgcaccataatttgtgag

SEQ ID NO: 9069 - DNA, 22 bp, Artificial Sequence
  Description of Artificial Sequence: Synthetic oligonucleotide
aattactgagcagttctctctc

SEQ ID NO: 9070 - DNA, 22 bp, Artificial Sequence
  Description of Artificial Sequence: Synthetic oligonucleotide
atcctcaaacagtttgtagcat

SEQ ID NO: 9071 - DNA, 22 bp, Artificial Sequence
  Description of Artificial Sequence: Synthetic oligonucleotide
atttaataacatctgcactcgg

SEQ ID NO: 9072 - DNA, 22 bp, Artificial Sequence
  Description of Artificial Sequence: Synthetic oligonucleotide
attatagcaaatactttcacgg

SEQ ID NO: 9073 - DNA, 22 bp, Artificial Sequence
  Description of Artificial Sequence: Synthetic oligonucleotide
ttatcattaactgttggaggtc

SEQ ID NO: 9074 - DNA, 22 bp, Artificial Sequence
  Description of Artificial Sequence: Synthetic oligonucleotide
atcactttgcatatagtcccat

SEQ ID NO: 9075 - DNA, 22 bp, Artificial Sequence
  Description of Artificial Sequence: Synthetic oligonucleotide
ttactcataaggtttacaaggt

SEQ ID NO: 9076 - DNA, 22 bp, Artificial Sequence
  Description of Artificial Sequence: Synthetic oligonucleotide
ttgtgatttcagaacctcaggt

SEQ ID NO: 9077 - DNA, 22 bp, Artificial Sequence
  Description of Artificial Sequence: Synthetic oligonucleotide
tagtaataacagattctttgcc

SEQ ID NO: 9078 - DNA, 22 bp, Artificial Sequence
  Description of Artificial Sequence: Synthetic oligonucleotide
tttcgttaaggaaagatgggtt

SEQ ID NO: 9079 - DNA, 22 bp, Artificial Sequence
  Description of Artificial Sequence: Synthetic oligonucleotide
atattgaataagaactccagta

SEQ ID NO: 9080 - DNA, 22 bp, Artificial Sequence
  Description of Artificial Sequence: Synthetic oligonucleotide
ttctattaacatggtttcgggc

SEQ ID NO: 9081 - DNA, 22 bp, Artificial Sequence
  Description of Artificial Sequence: Synthetic oligonucleotide
ttatctcatgactggttatgca

SEQ ID NO: 9082 - DNA, 22 bp, Artificial Sequence
  Description of Artificial Sequence: Synthetic oligonucleotide
ttcaaattcaacgtcctttcct

SEQ ID NO: 9083 - DNA, 22 bp, Artificial Sequence
  Description of Artificial Sequence: Synthetic oligonucleotide
ttcaataagaggaacatcagct

SEQ ID NO: 9084 - DNA, 22 bp, Artificial Sequence
  Description of Artificial Sequence: Synthetic oligonucleotide
atagtatccagatcaatcaggt

SEQ ID NO: 9085 - DNA, 22 bp, Artificial Sequence
  Description of Artificial Sequence: Synthetic oligonucleotide
atcccatatgagctcagctcca

SEQ ID NO: 9086 - DNA, 22 bp, Artificial Sequence
  Description of Artificial Sequence: Synthetic oligonucleotide
ttcttacatcagttaaggtcct

SEQ ID NO: 9087 - DNA, 22 bp, Artificial Sequence
  Description of Artificial Sequence: Synthetic oligonucleotide
attactaatgacctgccgcgcg

SEQ ID NO: 9088 - DNA, 22 bp, Artificial Sequence
  Description of Artificial Sequence: Synthetic oligonucleotide
atataccgaagttcaaagtggc

SEQ ID NO: 9089 - DNA, 22 bp, Artificial Sequence
  Description of Artificial Sequence: Synthetic oligonucleotide
atgtgattacagaaagtctgga

SEQ ID NO: 9090 - DNA, 22 bp, Artificial Sequence
  Description of Artificial Sequence: Synthetic oligonucleotide
tttctttagcatatttatctcc

SEQ ID NO: 9091 - DNA, 22 bp, Artificial Sequence
  Description of Artificial Sequence: Synthetic oligonucleotide
tccatagatcactttcaacctc

SEQ ID NO: 9092 - DNA, 22 bp, Artificial Sequence
  Description of Artificial Sequence: Synthetic oligonucleotide
ttatattcttcctgctcccgga

SEQ ID NO: 9093 - DNA, 22 bp, Artificial Sequence
  Description of Artificial Sequence: Synthetic oligonucleotide
tttattgtcaatggagggacct

SEQ ID NO: 9094 - DNA, 22 bp, Artificial Sequence
  Description of Artificial Sequence: Synthetic oligonucleotide
ttatgaaataacaaacctgggc

SEQ ID NO: 9095 - DNA, 22 bp, Artificial Sequence
  Description of Artificial Sequence: Synthetic oligonucleotide
ttaggacaacatttagaagggc

SEQ ID NO: 9096 - DNA, 22 bp, Artificial Sequence
  Description of Artificial Sequence: Synthetic oligonucleotide
ttctctcttggcactaaaggct

SEQ ID NO: 9097 - DNA, 22 bp, Artificial Sequence
  Description of Artificial Sequence: Synthetic oligonucleotide
tttaaatgggtgctacactggt

SEQ ID NO: 9098 - DNA, 22 bp, Artificial Sequence
  Description of Artificial Sequence: Synthetic oligonucleotide
atgaagaacaatccaatatggc

SEQ ID NO: 9099 - DNA, 22 bp, Artificial Sequence
  Description of Artificial Sequence: Synthetic oligonucleotide
attcattatgctgcaaagccgt

SEQ ID NO: 9100 - DNA, 22 bp, Artificial Sequence
  Description of Artificial Sequence: Synthetic oligonucleotide
tttccatagtcatctatcaggt

SEQ ID NO: 9101 - DNA, 22 bp, Artificial Sequence
  Description of Artificial Sequence: Synthetic oligonucleotide
caaatcagtcatggaacagcca

SEQ ID NO: 9102 - DNA, 22 bp, Artificial Sequence
  Description of Artificial Sequence: Synthetic oligonucleotide
tttaatgccaaacatgatcggg

SEQ ID NO: 9103 - DNA, 22 bp, Artificial Sequence
  Description of Artificial Sequence: Synthetic oligonucleotide
atatcttgagagatattctcct

SEQ ID NO: 9104 - DNA, 22 bp, Artificial Sequence
  Description of Artificial Sequence: Synthetic oligonucleotide
attctgtgtcccggtatcgggc

SEQ ID NO: 9105 - DNA, 22 bp, Artificial Sequence
  Description of Artificial Sequence: Synthetic oligonucleotide
tatcctgttcaataacttgcct

SEQ ID NO: 9106 - DNA, 22 bp, Artificial Sequence
  Description of Artificial Sequence: Synthetic oligonucleotide
tattgtaatagtctgagctgta

SEQ ID NO: 9107 - DNA, 22 bp, Artificial Sequence
  Description of Artificial Sequence: Synthetic oligonucleotide
ttatcttctaacacctctggtg

SEQ ID NO: 9108 - DNA, 22 bp, Artificial Sequence
  Description of Artificial Sequence: Synthetic oligonucleotide
tcatcctttgcaataatgactt

SEQ ID NO: 9109 - DNA, 22 bp, Artificial Sequence
  Description of Artificial Sequence: Synthetic oligonucleotide
tttcttcagaatcttcatagca

SEQ ID NO: 9110 - DNA, 22 bp, Artificial Sequence
  Description of Artificial Sequence: Synthetic oligonucleotide
ctccttaagcagcttgtgggcc

SEQ ID NO: 9111 - DNA, 22 bp, Artificial Sequence
  Description of Artificial Sequence: Synthetic oligonucleotide
tttcattgaaagcaaatgaggc

SEQ ID NO: 9112 - DNA, 22 bp, Artificial Sequence
  Description of Artificial Sequence: Synthetic oligonucleotide
tttcatgagaatagagaacctg

SEQ ID NO: 9113 - DNA, 22 bp, Artificial Sequence
  Description of Artificial Sequence: Synthetic oligonucleotide
aagtgcaaagagatgactgcag

SEQ ID NO: 9114 - DNA, 22 bp, Artificial Sequence
  Description of Artificial Sequence: Synthetic oligonucleotide
ttagttctggaaataccttggg

SEQ ID NO: 9115 - DNA, 22 bp, Artificial Sequence
  Description of Artificial Sequence: Synthetic oligonucleotide
attcctacacagttaaacagtg

SEQ ID NO: 9116 - DNA, 22 bp, Artificial Sequence
  Description of Artificial Sequence: Synthetic oligonucleotide
atacacacacatatacattcct

SEQ ID NO: 9117 - DNA, 22 bp, Artificial Sequence
  Description of Artificial Sequence: Synthetic oligonucleotide
tttgaggaagaggcagtaacct

SEQ ID NO: 9118 - DNA, 22 bp, Artificial Sequence
  Description of Artificial Sequence: Synthetic oligonucleotide
ataaggttctgaataatggcgt

SEQ ID NO: 9119 - DNA, 22 bp, Artificial Sequence
  Description of Artificial Sequence: Synthetic oligonucleotide
aatcataaggacactaattgga

SEQ ID NO: 9120 - DNA, 22 bp, Artificial Sequence
  Description of Artificial Sequence: Synthetic oligonucleotide
taagtttaagctacaggctgag

SEQ ID NO: 9121 - DNA, 22 bp, Artificial Sequence
  Description of Artificial Sequence: Synthetic oligonucleotide
gttgaacttgaggtaatagcgc

SEQ ID NO: 9122 - DNA, 22 bp, Artificial Sequence
  Description of Artificial Sequence: Synthetic oligonucleotide
tttaggaagcatgtccagacag

SEQ ID NO: 9123 - DNA, 22 bp, Artificial Sequence
  Description of Artificial Sequence: Synthetic oligonucleotide
tttaatgtgaatactactggtt

SEQ ID NO: 9124 - DNA, 22 bp, Artificial Sequence
  Description of Artificial Sequence: Synthetic oligonucleotide
ttgtccaagcacccagagggtg

SEQ ID NO: 9125 - DNA, 22 bp, Artificial Sequence
  Description of Artificial Sequence: Synthetic oligonucleotide
tttcatattcagaatcgatccc

SEQ ID NO: 9126 - DNA, 22 bp, Artificial Sequence
  Description of Artificial Sequence: Synthetic oligonucleotide
taatctgatgactcactttgct

SEQ ID NO: 9127 - DNA, 22 bp, Artificial Sequence
  Description of Artificial Sequence: Synthetic oligonucleotide
ttaagctgataaataaggtcca

SEQ ID NO: 9128 - DNA, 22 bp, Artificial Sequence
  Description of Artificial Sequence: Synthetic oligonucleotide
taacgagtagagctgctgagcc

SEQ ID NO: 9129 - DNA, 22 bp, Artificial Sequence
  Description of Artificial Sequence: Synthetic oligonucleotide
ttcaatctccacacctttgggc

SEQ ID NO: 9130 - DNA, 22 bp, Artificial Sequence
  Description of Artificial Sequence: Synthetic oligonucleotide
ttaagattgcatactgactgtt

SEQ ID NO: 9131 - DNA, 22 bp, Artificial Sequence
  Description of Artificial Sequence: Synthetic oligonucleotide
gtagtgtttcacattgtcaccc

SEQ ID NO: 9132 - DNA, 22 bp, Artificial Sequence
  Description of Artificial Sequence: Synthetic oligonucleotide
atttggtcccatgatattcctt

SEQ ID NO: 9133 - DNA, 22 bp, Artificial Sequence
  Description of Artificial Sequence: Synthetic oligonucleotide
ttatactttcaaattccacttc

SEQ ID NO: 9134 - DNA, 22 bp, Artificial Sequence
  Description of Artificial Sequence: Synthetic oligonucleotide
tgataagaggaaataatgacag

SEQ ID NO: 9135 - DNA, 22 bp, Artificial Sequence
  Description of Artificial Sequence: Synthetic oligonucleotide
atttacaacatccaaactcgtg

SEQ ID NO: 9136 - DNA, 22 bp, Artificial Sequence
  Description of Artificial Sequence: Synthetic oligonucleotide
atttacacactgatgaggaggc

SEQ ID NO: 9137 - DNA, 22 bp, Artificial Sequence
  Description of Artificial Sequence: Synthetic oligonucleotide
tttcaggacacgattatcacgg

SEQ ID NO: 9138 - DNA, 22 bp, Artificial Sequence
  Description of Artificial Sequence: Synthetic oligonucleotide
aattatcacaaagaggacaggt

SEQ ID NO: 9139 - DNA, 22 bp, Artificial Sequence
  Description of Artificial Sequence: Synthetic oligonucleotide
aattcagaactcttgttgagtg

SEQ ID NO: 9140 - DNA, 22 bp, Artificial Sequence
  Description of Artificial Sequence: Synthetic oligonucleotide
atttcaaataacgtcttgctga

SEQ ID NO: 9141 - DNA, 22 bp, Artificial Sequence
  Description of Artificial Sequence: Synthetic oligonucleotide
ttaaagaaggtgtttgtcgcga

SEQ ID NO: 9142 - DNA, 22 bp, Artificial Sequence
  Description of Artificial Sequence: Synthetic oligonucleotide
gatctctgtattataatgtgct

SEQ ID NO: 9143 - DNA, 22 bp, Artificial Sequence
  Description of Artificial Sequence: Synthetic oligonucleotide
ttcacattgaccttgaagcgcc

SEQ ID NO: 9144 - DNA, 22 bp, Artificial Sequence
  Description of Artificial Sequence: Synthetic oligonucleotide
ttcacataggccttcctggctt

SEQ ID NO: 9145 - DNA, 22 bp, Artificial Sequence
  Description of Artificial Sequence: Synthetic oligonucleotide
tttcatagagctcggcacaggt

SEQ ID NO: 9146 - DNA, 22 bp, Artificial Sequence
  Description of Artificial Sequence: Synthetic oligonucleotide
tttgcacagaacttccagttct

SEQ ID NO: 9147 - DNA, 22 bp, Artificial Sequence
  Description of Artificial Sequence: Synthetic oligonucleotide
ataatgtacaagcatctcttgc

SEQ ID NO: 9148 - DNA, 22 bp, Artificial Sequence
  Description of Artificial Sequence: Synthetic oligonucleotide
taatcctataacccagtagcca

SEQ ID NO: 9149 - DNA, 22 bp, Artificial Sequence
  Description of Artificial Sequence: Synthetic oligonucleotide
gtattctgtaatcctataaccc

SEQ ID NO: 9150 - DNA, 22 bp, Artificial Sequence
  Description of Artificial Sequence: Synthetic oligonucleotide
tttcataggcaggcactgcttg

SEQ ID NO: 9151 - DNA, 22 bp, Artificial Sequence
  Description of Artificial Sequence: Synthetic oligonucleotide
ttctcgcacgaggaaggtccct

SEQ ID NO: 9152 - DNA, 22 bp, Artificial Sequence
  Description of Artificial Sequence: Synthetic oligonucleotide
taaacgattcactttatttcga

SEQ ID NO: 9153 - DNA, 22 bp, Artificial Sequence
  Description of Artificial Sequence: Synthetic oligonucleotide
tttcaataagagatctacagtg

SEQ ID NO: 9154 - DNA, 22 bp, Artificial Sequence
  Description of Artificial Sequence: Synthetic oligonucleotide
tttaacaagcaatttgtctctc

SEQ ID NO: 9155 - DNA, 22 bp, Artificial Sequence
  Description of Artificial Sequence: Synthetic oligonucleotide
ttcatgttagagacaaactgta

SEQ ID NO: 9156 - DNA, 22 bp, Artificial Sequence
  Description of Artificial Sequence: Synthetic oligonucleotide
ttcgtgaaagaagctaagagat

SEQ ID NO: 9157 - DNA, 22 bp, Artificial Sequence
  Description of Artificial Sequence: Synthetic oligonucleotide
ttagggaacggaggaaacacta

SEQ ID NO: 9158 - DNA, 22 bp, Artificial Sequence
  Description of Artificial Sequence: Synthetic oligonucleotide
atgtgaaatcacattatggcca

SEQ ID NO: 9159 - DNA, 22 bp, Artificial Sequence
  Description of Artificial Sequence: Synthetic oligonucleotide
ttgaagagtcaatgactgaggt

SEQ ID NO: 9160 - DNA, 22 bp, Artificial Sequence
  Description of Artificial Sequence: Synthetic oligonucleotide
tacattgaagagtcaatgactg

SEQ ID NO: 9161 - DNA, 22 bp, Artificial Sequence
  Description of Artificial Sequence: Synthetic oligonucleotide
attacattgaagagtcaatgac

SEQ ID NO: 9162 - DNA, 22 bp, Artificial Sequence
  Description of Artificial Sequence: Synthetic oligonucleotide
tttcttctacaccatttcgccc

SEQ ID NO: 9163 - DNA, 22 bp, Artificial Sequence
  Description of Artificial Sequence: Synthetic oligonucleotide
ttacatggacaaattaagtcct

SEQ ID NO: 9164 - DNA, 22 bp, Artificial Sequence
  Description of Artificial Sequence: Synthetic oligonucleotide
atactgtttcgtaagctgagct

SEQ ID NO: 9165 - DNA, 22 bp, Artificial Sequence
  Description of Artificial Sequence: Synthetic oligonucleotide
taatactgatatcttgtggcct

SEQ ID NO: 9166 - DNA, 22 bp, Artificial Sequence
  Description of Artificial Sequence: Synthetic oligonucleotide
atcgatgatcacatacactctt

SEQ ID NO: 9167 - DNA, 22 bp, Artificial Sequence
  Description of Artificial Sequence: Synthetic oligonucleotide
atctctttgaagaatgggtgct

SEQ ID NO: 9168 - DNA, 22 bp, Artificial Sequence
  Description of Artificial Sequence: Synthetic oligonucleotide
ttagtatctgacatttggccag

SEQ ID NO: 9169 - DNA, 22 bp, Artificial Sequence
  Description of Artificial Sequence: Synthetic oligonucleotide
tagagcttccagataatcacat

SEQ ID NO: 9170 - DNA, 22 bp, Artificial Sequence
  Description of Artificial Sequence: Synthetic oligonucleotide
ttagctcatagcagaacttctc

SEQ ID NO: 9171 - DNA, 22 bp, Artificial Sequence
  Description of Artificial Sequence: Synthetic oligonucleotide
ataacatcacgccagatcaggc

SEQ ID NO: 9172 - DNA, 22 bp, Artificial Sequence
  Description of Artificial Sequence: Synthetic oligonucleotide
taatcttataacaagattggta

SEQ ID NO: 9173 - DNA, 22 bp, Artificial Sequence
  Description of Artificial Sequence: Synthetic oligonucleotide
taagctatcctattaattgggc

SEQ ID NO: 9174 - DNA, 22 bp, Artificial Sequence
  Description of Artificial Sequence: Synthetic oligonucleotide
tttaaacaagagcacgatgctg

SEQ ID NO: 9175 - DNA, 22 bp, Artificial Sequence
  Description of Artificial Sequence: Synthetic oligonucleotide
ttatacttggcagtgttctggt

SEQ ID NO: 9176 - DNA, 22 bp, Artificial Sequence
  Description of Artificial Sequence: Synthetic oligonucleotide
attcaggatgggatgcagtggg

SEQ ID NO: 9177 - DNA, 22 bp, Artificial Sequence
  Description of Artificial Sequence: Synthetic oligonucleotide
tttctgttgagcatagcgggct

SEQ ID NO: 9178 - DNA, 22 bp, Artificial Sequence
  Description of Artificial Sequence: Synthetic oligonucleotide
taaggataatgcggccactggc

SEQ ID NO: 9179 - DNA, 22 bp, Artificial Sequence
  Description of Artificial Sequence: Synthetic oligonucleotide
tttctgtaacactttgacagca

SEQ ID NO: 9180 - DNA, 22 bp, Artificial Sequence
  Description of Artificial Sequence: Synthetic oligonucleotide
tttaagccaaagagtattggtg

SEQ ID NO: 9181 - DNA, 22 bp, Artificial Sequence
  Description of Artificial Sequence: Synthetic oligonucleotide
ttacgttcagccataatatgtt

SEQ ID NO: 9182 - DNA, 22 bp, Artificial Sequence
  Description of Artificial Sequence: Synthetic oligonucleotide
ataatccacaaagttgaactgg

SEQ ID NO: 9183 - DNA, 22 bp, Artificial Sequence
  Description of Artificial Sequence: Synthetic oligonucleotide
tttattgtacctactgcctcct

SEQ ID NO: 9184 - DNA, 22 bp, Artificial Sequence
  Description of Artificial Sequence: Synthetic oligonucleotide
atatacatggaatatctcggcg

SEQ ID NO: 9185 - DNA, 22 bp, Artificial Sequence
  Description of Artificial Sequence: Synthetic oligonucleotide
atttgcttgcagaagttctcgc

SEQ ID NO: 9186 - DNA, 22 bp, Artificial Sequence
  Description of Artificial Sequence: Synthetic oligonucleotide
atgaatataaatcttatgagct

SEQ ID NO: 9187 - DNA, 22 bp, Artificial Sequence
  Description of Artificial Sequence: Synthetic oligonucleotide
taaaggcattcatttaatgccc

SEQ ID NO: 9188 - DNA, 22 bp, Artificial Sequence
  Description of Artificial Sequence: Synthetic oligonucleotide
taatcctatggtattcagaggt

SEQ ID NO: 9189 - DNA, 22 bp, Artificial Sequence
  Description of Artificial Sequence: Synthetic oligonucleotide
tgaagtactgatgttcagcggg

SEQ ID NO: 9190 - DNA, 22 bp, Artificial Sequence
  Description of Artificial Sequence: Synthetic oligonucleotide
ttaatattgcaatgaccaccct

SEQ ID NO: 9191 - DNA, 22 bp, Artificial Sequence
  Description of Artificial Sequence: Synthetic oligonucleotide
ttcttgaatgggagaatctggc

SEQ ID NO: 9192 - DNA, 22 bp, Artificial Sequence
  Description of Artificial Sequence: Synthetic oligonucleotide
tttgataacatcagttacaccc

SEQ ID NO: 9193 - DNA, 22 bp, Artificial Sequence
  Description of Artificial Sequence: Synthetic oligonucleotide
atttgcaaggcatgtatctgat

SEQ ID NO: 9194 - DNA, 22 bp, Artificial Sequence
  Description of Artificial Sequence: Synthetic oligonucleotide
gacaacaaatacagaatatgct

SEQ ID NO: 9195 - DNA, 22 bp, Artificial Sequence
  Description of Artificial Sequence: Synthetic oligonucleotide
attctccttgcaatagattgtt

SEQ ID NO: 9196 - DNA, 22 bp, Artificial Sequence
  Description of Artificial Sequence: Synthetic oligonucleotide
atgcaagatactcttcactggt

SEQ ID NO: 9197 - DNA, 22 bp, Artificial Sequence
  Description of Artificial Sequence: Synthetic oligonucleotide
ttctctattggtttcttggcgg

SEQ ID NO: 9198 - DNA, 22 bp, Artificial Sequence
  Description of Artificial Sequence: Synthetic oligonucleotide
ttattgtcataggacatctcct

SEQ ID NO: 9199 - DNA, 22 bp, Artificial Sequence
  Description of Artificial Sequence: Synthetic oligonucleotide
aatatttcttccattccatccg

SEQ ID NO: 9200 - DNA, 22 bp, Artificial Sequence
  Description of Artificial Sequence: Synthetic oligonucleotide
taacatcaacatagtaccagga

SEQ ID NO: 9201 - DNA, 22 bp, Artificial Sequence
  Description of Artificial Sequence: Synthetic oligonucleotide
gtatctccggacaatgcgaggg

SEQ ID NO: 9202 - DNA, 22 bp, Artificial Sequence
  Description of Artificial Sequence: Synthetic oligonucleotide
atctgaactggtacaaactggc

SEQ ID NO: 9203 - DNA, 22 bp, Artificial Sequence
  Description of Artificial Sequence: Synthetic oligonucleotide
ctcaaacaccaggtaaatgtcc

SEQ ID NO: 9204 - DNA, 22 bp, Artificial Sequence
  Description of Artificial Sequence: Synthetic oligonucleotide
atttcccggaatgttctctggg

SEQ ID NO: 9205 - DNA, 22 bp, Artificial Sequence
  Description of Artificial Sequence: Synthetic oligonucleotide
tttattggaggaagtcagtggg

SEQ ID NO: 9206 - DNA, 22 bp, Artificial Sequence
  Description of Artificial Sequence: Synthetic oligonucleotide
tatcatcttggtagaaagggcg

SEQ ID NO: 9207 - DNA, 22 bp, Artificial Sequence
  Description of Artificial Sequence: Synthetic oligonucleotide
tcatcttggtagaaagggcgtg

SEQ ID NO: 9208 - DNA, 22 bp, Artificial Sequence
  Description of Artificial Sequence: Synthetic oligonucleotide
taagtgatacccacaacatggc

SEQ ID NO: 9209 - DNA, 22 bp, Artificial Sequence
  Description of Artificial Sequence: Synthetic oligonucleotide
ttaaataacgagattaactgca

SEQ ID NO: 9210 - DNA, 22 bp, Artificial Sequence
  Description of Artificial Sequence: Synthetic oligonucleotide
ttattgctacacgttcttgcct

SEQ ID NO: 9211 - DNA, 22 bp, Artificial Sequence
  Description of Artificial Sequence: Synthetic oligonucleotide
tttacatagcattctaaacggt

SEQ ID NO: 9212 - DNA, 22 bp, Artificial Sequence
  Description of Artificial Sequence: Synthetic oligonucleotide
tttagatctgagactattccag

SEQ ID NO: 9213 - DNA, 22 bp, Artificial Sequence
  Description of Artificial Sequence: Synthetic oligonucleotide
tatagttagcaatctaacagaa

SEQ ID NO: 9214 - DNA, 22 bp, Artificial Sequence
  Description of Artificial Sequence: Synthetic oligonucleotide
ttaatagttcatccatactggt

SEQ ID NO: 9215 - DNA, 22 bp, Artificial Sequence
  Description of Artificial Sequence: Synthetic oligonucleotide
ataaactttcggacagagtctt

SEQ ID NO: 9216 - DNA, 22 bp, Artificial Sequence
  Description of Artificial Sequence: Synthetic oligonucleotide
ttaaacacctgaagttactggg

SEQ ID NO: 9217 - DNA, 22 bp, Artificial Sequence
  Description of Artificial Sequence: Synthetic oligonucleotide
attgcttacgtcacatattcca

SEQ ID NO: 9218 - DNA, 22 bp, Artificial Sequence
  Description of Artificial Sequence: Synthetic oligonucleotide
atattaagtggaagcctctggg

SEQ ID NO: 9219 - DNA, 22 bp, Artificial Sequence
  Description of Artificial Sequence: Synthetic oligonucleotide
aatgaagtggagactgaagggc

SEQ ID NO: 9220 - DNA, 22 bp, Artificial Sequence
  Description of Artificial Sequence: Synthetic oligonucleotide
tatagtgttgactattgcggtg

SEQ ID NO: 9221 - DNA, 22 bp, Artificial Sequence
  Description of Artificial Sequence: Synthetic oligonucleotide
tatgcatactccagaatctgct

SEQ ID NO: 9222 - DNA, 22 bp, Artificial Sequence
  Description of Artificial Sequence: Synthetic oligonucleotide
ttgaggtaccgagccttgcggt

SEQ ID NO: 9223 - DNA, 22 bp, Artificial Sequence
  Description of Artificial Sequence: Synthetic oligonucleotide
atgatgtaacatcttgtccctg

SEQ ID NO: 9224 - DNA, 22 bp, Artificial Sequence
  Description of Artificial Sequence: Synthetic oligonucleotide
tatactgatgatgtaacatctt

SEQ ID NO: 9225 - DNA, 22 bp, Artificial Sequence
  Description of Artificial Sequence: Synthetic oligonucleotide
ttaagaaactggttggtgacct

SEQ ID NO: 9226 - DNA, 22 bp, Artificial Sequence
  Description of Artificial Sequence: Synthetic oligonucleotide
atacatcaacgaattgccagtt

SEQ ID NO: 9227 - DNA, 22 bp, Artificial Sequence
  Description of Artificial Sequence: Synthetic oligonucleotide
tcacataatgagacagactcca

SEQ ID NO: 9228 - DNA, 22 bp, Artificial Sequence
  Description of Artificial Sequence: Synthetic oligonucleotide
aattgcagtgacataggcacag

SEQ ID NO: 9229 - DNA, 22 bp, Artificial Sequence
  Description of Artificial Sequence: Synthetic oligonucleotide
ataatgagacagactccagtct

SEQ ID NO: 9230 - DNA, 22 bp, Artificial Sequence
  Description of Artificial Sequence: Synthetic oligonucleotide
ttaaaccttgaagttacatgct

SEQ ID NO: 9231 - DNA, 22 bp, Artificial Sequence
  Description of Artificial Sequence: Synthetic oligonucleotide
atgaagctgaaatatatctcgg

SEQ ID NO: 9232 - DNA, 22 bp, Artificial Sequence
  Description of Artificial Sequence: Synthetic oligonucleotide
tatccagttcaaggtcaatgct

SEQ ID NO: 9233 - DNA, 22 bp, Artificial Sequence
  Description of Artificial Sequence: Synthetic oligonucleotide
agatggtttcacacaataggct

SEQ ID NO: 9234 - DNA, 22 bp, Artificial Sequence
  Description of Artificial Sequence: Synthetic oligonucleotide
tatactttgtatgttccctcca

SEQ ID NO: 9235 - DNA, 22 bp, Artificial Sequence
  Description of Artificial Sequence: Synthetic oligonucleotide
tttgtaatccctggagtagggc

SEQ ID NO: 9236 - DNA, 22 bp, Artificial Sequence
  Description of Artificial Sequence: Synthetic oligonucleotide
attcagttctgtataaagtcga

SEQ ID NO: 9237 - DNA, 22 bp, Artificial Sequence
  Description of Artificial Sequence: Synthetic oligonucleotide
taaagtcgataggacttctggt

SEQ ID NO: 9238 - DNA, 22 bp, Artificial Sequence
  Description of Artificial Sequence: Synthetic oligonucleotide
atatagctacaatatttgcctg

SEQ ID NO: 9239 - DNA, 22 bp, Artificial Sequence
  Description of Artificial Sequence: Synthetic oligonucleotide
tttaaacatcaagacggcatgc

SEQ ID NO: 9240 - DNA, 22 bp, Artificial Sequence
  Description of Artificial Sequence: Synthetic oligonucleotide
atacatcacagtgttagtggca

SEQ ID NO: 9241 - DNA, 22 bp, Artificial Sequence
  Description of Artificial Sequence: Synthetic oligonucleotide
ttcaatggagacaaattatgcc

SEQ ID NO: 9242 - DNA, 22 bp, Artificial Sequence
  Description of Artificial Sequence: Synthetic oligonucleotide
tttgaccttgccagggctaggg

SEQ ID NO: 9243 - DNA, 22 bp, Artificial Sequence
  Description of Artificial Sequence: Synthetic oligonucleotide
atctcctcttcctttctgagtg

SEQ ID NO: 9244 - DNA, 22 bp, Artificial Sequence
  Description of Artificial Sequence: Synthetic oligonucleotide
ttctgagtggaggtagctgcac

SEQ ID NO: 9245 - DNA, 22 bp, Artificial Sequence
  Description of Artificial Sequence: Synthetic oligonucleotide
attatcccacaaatgatcactt

SEQ ID NO: 9246 - DNA, 22 bp, Artificial Sequence
  Description of Artificial Sequence: Synthetic oligonucleotide
taaatctgttaatatgtctgga

SEQ ID NO: 9247 - DNA, 22 bp, Artificial Sequence
  Description of Artificial Sequence: Synthetic oligonucleotide
taaagtccacagctagcgtggg

SEQ ID NO: 9248 - DNA, 22 bp, Artificial Sequence
  Description of Artificial Sequence: Synthetic oligonucleotide
atagagcactgaatacaagccc

SEQ ID NO: 9249 - DNA, 22 bp, Artificial Sequence
  Description of Artificial Sequence: Synthetic oligonucleotide
tttggacataacacacattgcg

SEQ ID NO: 9250 - DNA, 22 bp, Artificial Sequence
  Description of Artificial Sequence: Synthetic oligonucleotide
tttcggaagaggtgcgtggccc

SEQ ID NO: 9251 - DNA, 22 bp, Artificial Sequence
  Description of Artificial Sequence: Synthetic oligonucleotide
tttctctaaatttgtcgctggt

SEQ ID NO: 9252 - DNA, 22 bp, Artificial Sequence
  Description of Artificial Sequence: Synthetic oligonucleotide
taaggtaaagagaatgttgcca

SEQ ID NO: 9253 - DNA, 22 bp, Artificial Sequence
  Description of Artificial Sequence: Synthetic oligonucleotide
tttatcacggtcctgatctggt

SEQ ID NO: 9254 - DNA, 22 bp, Artificial Sequence
  Description of Artificial Sequence: Synthetic oligonucleotide
attgcttctaactgagcatcgg

SEQ ID NO: 9255 - DNA, 22 bp, Artificial Sequence
  Description of Artificial Sequence: Synthetic oligonucleotide
tttatcttcagagttactacgt

SEQ ID NO: 9256 - DNA, 22 bp, Artificial Sequence
  Description of Artificial Sequence: Synthetic oligonucleotide
atcaactgcctgaatatttgcc

SEQ ID NO: 9257 - DNA, 22 bp, Artificial Sequence
  Description of Artificial Sequence: Synthetic oligonucleotide
ataagttcaataactatgtcct

SEQ ID NO: 9258 - DNA, 22 bp, Artificial Sequence
  Description of Artificial Sequence: Synthetic oligonucleotide
tttcttagctaagatatctggt

SEQ ID NO: 9259 - DNA, 22 bp, Artificial Sequence
  Description of Artificial Sequence: Synthetic oligonucleotide
tatctgtaacagaatcataggt

SEQ ID NO: 9260 - DNA, 22 bp, Artificial Sequence
  Description of Artificial Sequence: Synthetic oligonucleotide
ttaaagaagcacttgctttgga

SEQ ID NO: 9261 - DNA, 22 bp, Artificial Sequence
  Description of Artificial Sequence: Synthetic oligonucleotide
ttataaactgtctgaacacttc

SEQ ID NO: 9262 - DNA, 22 bp, Artificial Sequence
  Description of Artificial Sequence: Synthetic oligonucleotide
attatttaacgggcttgcaggg

SEQ ID NO: 9263 - DNA, 22 bp, Artificial Sequence
  Description of Artificial Sequence: Synthetic oligonucleotide
atagggaattatttaacgggct

SEQ ID NO: 9264 - DNA, 22 bp, Artificial Sequence
  Description of Artificial Sequence: Synthetic oligonucleotide
aatagactgctgctgacggcgc

SEQ ID NO: 9265 - DNA, 22 bp, Artificial Sequence
  Description of Artificial Sequence: Synthetic oligonucleotide
atttggatttatagtaattggc

SEQ ID NO: 9266 - DNA, 22 bp, Artificial Sequence
  Description of Artificial Sequence: Synthetic oligonucleotide
tttattaaagaatgcacaccca

SEQ ID NO: 9267 - DNA, 22 bp, Artificial Sequence
  Description of Artificial Sequence: Synthetic oligonucleotide
atttagaagggacatggaccca

SEQ ID NO: 9268 - DNA, 22 bp, Artificial Sequence
  Description of Artificial Sequence: Synthetic oligonucleotide
tttgctgatgatcttgatgccg

SEQ ID NO: 9269 - DNA, 22 bp, Artificial Sequence
  Description of Artificial Sequence: Synthetic oligonucleotide
tatgagaatgggagactgtgga

SEQ ID NO: 9270 - DNA, 22 bp, Artificial Sequence
  Description of Artificial Sequence: Synthetic oligonucleotide
tatatgtgactaagaatccggc

SEQ ID NO: 9271 - DNA, 22 bp, Artificial Sequence
  Description of Artificial Sequence: Synthetic oligonucleotide
taagggatcgatttcaccagcg

SEQ ID NO: 9272 - DNA, 22 bp, Artificial Sequence
  Description of Artificial Sequence: Synthetic oligonucleotide
tttggtgactccggtatggccc

SEQ ID NO: 9273 - DNA, 22 bp, Artificial Sequence
  Description of Artificial Sequence: Synthetic oligonucleotide
attcatattcttattccgtcca

SEQ ID NO: 9274 - DNA, 22 bp, Artificial Sequence
  Description of Artificial Sequence: Synthetic oligonucleotide
atacgatacgagagaaactcca

SEQ ID NO: 9275 - DNA, 22 bp, Artificial Sequence
  Description of Artificial Sequence: Synthetic oligonucleotide
taagtgtattctgtcagtccct

SEQ ID NO: 9276 - DNA, 22 bp, Artificial Sequence
  Description of Artificial Sequence: Synthetic oligonucleotide
tttatcatcagcaaggcttgca

SEQ ID NO: 9277 - DNA, 22 bp, Artificial Sequence
  Description of Artificial Sequence: Synthetic oligonucleotide
aatttccttgcactttacagca

SEQ ID NO: 9278 - DNA, 22 bp, Artificial Sequence
  Description of Artificial Sequence: Synthetic oligonucleotide
ttaagtgtattctgtcagtccc

SEQ ID NO: 9279 - DNA, 22 bp, Artificial Sequence
  Description of Artificial Sequence: Synthetic oligonucleotide
atattctacaaagtcagctggc

SEQ ID NO: 9280 - DNA, 22 bp, Artificial Sequence
  Description of Artificial Sequence: Synthetic oligonucleotide
taaatctttgatgtcccgaggc

SEQ ID NO: 9281 - DNA, 22 bp, Artificial Sequence
  Description of Artificial Sequence: Synthetic oligonucleotide
atctaggagaatattctcgggc

SEQ ID NO: 9282 - DNA, 22 bp, Artificial Sequence
  Description of Artificial Sequence: Synthetic oligonucleotide
tttaaccttgttcccagaagca

SEQ ID NO: 9283 - DNA, 22 bp, Artificial Sequence
  Description of Artificial Sequence: Synthetic oligonucleotide
tttattaatgactttgcctggt

SEQ ID NO: 9284 - DNA, 22 bp, Artificial Sequence
  Description of Artificial Sequence: Synthetic oligonucleotide
atatatagactggtcaggtcca

SEQ ID NO: 9285 - DNA, 22 bp, Artificial Sequence
  Description of Artificial Sequence: Synthetic oligonucleotide
tttcaggtagacctcagaagga

SEQ ID NO: 9286 - DNA, 22 bp, Artificial Sequence
  Description of Artificial Sequence: Synthetic oligonucleotide
tataatttctaaagtccatgga

SEQ ID NO: 9287 - DNA, 22 bp, Artificial Sequence
  Description of Artificial Sequence: Synthetic oligonucleotide
ttatctctgatcacttgctgca

SEQ ID NO: 9288 - DNA, 22 bp, Artificial Sequence
  Description of Artificial Sequence: Synthetic oligonucleotide
ataaataaacgtgttcgacccg

SEQ ID NO: 9289 - DNA, 22 bp, Artificial Sequence
  Description of Artificial Sequence: Synthetic oligonucleotide
tattgtgaggacaatacaggct

SEQ ID NO: 9290 - DNA, 22 bp, Artificial Sequence
  Description of Artificial Sequence: Synthetic oligonucleotide
ttcttctatactattgtgagga

SEQ ID NO: 9291 - DNA, 22 bp, Artificial Sequence
  Description of Artificial Sequence: Synthetic oligonucleotide
taaataaacgtgttcgacccgc

SEQ ID NO: 9292 - DNA, 22 bp, Artificial Sequence
  Description of Artificial Sequence: Synthetic oligonucleotide
aataaataaacgtgttcgaccc

SEQ ID NO: 9293 - DNA, 22 bp, Artificial Sequence
  Description of Artificial Sequence: Synthetic oligonucleotide
ttacttctaacacaaatgtcct

SEQ ID NO: 9294 - DNA, 22 bp, Artificial Sequence
  Description of Artificial Sequence: Synthetic oligonucleotide
atttccatgatccgatgcaggg

SEQ ID NO: 9295 - DNA, 22 bp, Artificial Sequence
  Description of Artificial Sequence: Synthetic oligonucleotide
attctgtcaaaggctgatggcg

SEQ ID NO: 9296 - DNA, 22 bp, Artificial Sequence
  Description of Artificial Sequence: Synthetic oligonucleotide
attacaattctctttaagccgt

SEQ ID NO: 9297 - DNA, 22 bp, Artificial Sequence
  Description of Artificial Sequence: Synthetic oligonucleotide
atagatttccaaagctgctgct

SEQ ID NO: 9298 - DNA, 22 bp, Artificial Sequence
  Description of Artificial Sequence: Synthetic oligonucleotide
ttcagatagggaagaagaacca

SEQ ID NO: 9299 - DNA, 22 bp, Artificial Sequence
  Description of Artificial Sequence: Synthetic oligonucleotide
atagtctaggtgtacaggtggt

SEQ ID NO: 9300 - DNA, 22 bp, Artificial Sequence
  Description of Artificial Sequence: Synthetic oligonucleotide
tttggtacaaagagcttccgca

SEQ ID NO: 9301 - DNA, 22 bp, Artificial Sequence
  Description of Artificial Sequence: Synthetic oligonucleotide
ataggtgatctactagaagcca

SEQ ID NO: 9302 - DNA, 22 bp, Artificial Sequence
  Description of Artificial Sequence: Synthetic oligonucleotide
tttcagttccatgtgactccga

SEQ ID NO: 9303 - DNA, 22 bp, Artificial Sequence
  Description of Artificial Sequence: Synthetic oligonucleotide
gtaatctaccagttcctcaggg

SEQ ID NO: 9304 - DNA, 22 bp, Artificial Sequence
  Description of Artificial Sequence: Synthetic oligonucleotide
aatttcagaccaacaaggcgga

SEQ ID NO: 9305 - DNA, 22 bp, Artificial Sequence
  Description of Artificial Sequence: Synthetic oligonucleotide
actagatttcctacagcctggt

SEQ ID NO: 9306 - DNA, 22 bp, Artificial Sequence
  Description of Artificial Sequence: Synthetic oligonucleotide
ttcatagatccagttctgagca

SEQ ID NO: 9307 - DNA, 22 bp, Artificial Sequence
  Description of Artificial Sequence: Synthetic oligonucleotide
atttaattcacgacttactcgt

SEQ ID NO: 9308 - DNA, 22 bp, Artificial Sequence
  Description of Artificial Sequence: Synthetic oligonucleotide
attgctgatggacgtgagggcc

SEQ ID NO: 9309 - DNA, 22 bp, Artificial Sequence
  Description of Artificial Sequence: Synthetic oligonucleotide
taattcacgacttactcgtcct

SEQ ID NO: 9310 - DNA, 22 bp, Artificial Sequence
  Description of Artificial Sequence: Synthetic oligonucleotide
ttaatgatgccatctgcatcca

SEQ ID NO: 9311 - DNA, 22 bp, Artificial Sequence
  Description of Artificial Sequence: Synthetic oligonucleotide
tagaatccacatagtggtgcct

SEQ ID NO: 9312 - DNA, 22 bp, Artificial Sequence
  Description of Artificial Sequence: Synthetic oligonucleotide
aacccaaacagcattgagagcc

SEQ ID NO: 9313 - DNA, 22 bp, Artificial Sequence
  Description of Artificial Sequence: Synthetic oligonucleotide
tttccacatcagaatcttcccg

SEQ ID NO: 9314 - DNA, 22 bp, Artificial Sequence
  Description of Artificial Sequence: Synthetic oligonucleotide
ttatcctctgtgacaatggcct

SEQ ID NO: 9315 - DNA, 22 bp, Artificial Sequence
  Description of Artificial Sequence: Synthetic oligonucleotide
tttgatacagactgtactcggg

SEQ ID NO: 9316 - DNA, 22 bp, Artificial Sequence
  Description of Artificial Sequence: Synthetic oligonucleotide
ttattacaggatccacatagga

SEQ ID NO: 9317 - DNA, 22 bp, Artificial Sequence
  Description of Artificial Sequence: Synthetic oligonucleotide
tttacgttcacataagtagcgt

SEQ ID NO: 9318 - DNA, 22 bp, Artificial Sequence
  Description of Artificial Sequence: Synthetic oligonucleotide
atagacaatgggatcttcacgg

SEQ ID NO: 9319 - DNA, 22 bp, Artificial Sequence
  Description of Artificial Sequence: Synthetic oligonucleotide
taaagactggtaattaggaccc

SEQ ID NO: 9320 - DNA, 22 bp, Artificial Sequence
  Description of Artificial Sequence: Synthetic oligonucleotide
ttaatcaaattaaggaacagca

SEQ ID NO: 9321 - DNA, 22 bp, Artificial Sequence
  Description of Artificial Sequence: Synthetic oligonucleotide
atatctcttagaagaaaggcca

SEQ ID NO: 9322 - DNA, 22 bp, Artificial Sequence
  Description of Artificial Sequence: Synthetic oligonucleotide
tttcacttaattcctactccct

SEQ ID NO: 9323 - DNA, 22 bp, Artificial Sequence
  Description of Artificial Sequence: Synthetic oligonucleotide
ttagatatccacagtggagcgt

SEQ ID NO: 9324 - DNA, 22 bp, Artificial Sequence
  Description of Artificial Sequence: Synthetic oligonucleotide
ttgtccaaacactttcactggc

SEQ ID NO: 9325 - DNA, 22 bp, Artificial Sequence
  Description of Artificial Sequence: Synthetic oligonucleotide
aatatccatttgagaaagcgcc

SEQ ID NO: 9326 - DNA, 22 bp, Artificial Sequence
  Description of Artificial Sequence: Synthetic oligonucleotide
ttctgggttgattgtagcagca

SEQ ID NO: 9327 - DNA, 22 bp, Artificial Sequence
  Description of Artificial Sequence: Synthetic oligonucleotide
ttcatcttcctgaatgtgacct

SEQ ID NO: 9328 - DNA, 22 bp, Artificial Sequence
  Description of Artificial Sequence: Synthetic oligonucleotide
tattgggcccggatgtctgcca

SEQ ID NO: 9329 - DNA, 22 bp, Artificial Sequence
  Description of Artificial Sequence: Synthetic oligonucleotide
ttatttgctctgaggctctgca

SEQ ID NO: 9330 - DNA, 22 bp, Artificial Sequence
  Description of Artificial Sequence: Synthetic oligonucleotide
tatgtcatacatttcagcaggt

SEQ ID NO: 9331 - DNA, 22 bp, Artificial Sequence
  Description of Artificial Sequence: Synthetic oligonucleotide
taaatggaattgcttaagccgt

SEQ ID NO: 9332 - DNA, 22 bp, Artificial Sequence
  Description of Artificial Sequence: Synthetic oligonucleotide
tttgagttcagacatgagggct

SEQ ID NO: 9333 - DNA, 22 bp, Artificial Sequence
  Description of Artificial Sequence: Synthetic oligonucleotide
atactgtagtgtttatcatggg

SEQ ID NO: 9334 - DNA, 22 bp, Artificial Sequence
  Description of Artificial Sequence: Synthetic oligonucleotide
attctgtaatgaccagggtggg

SEQ ID NO: 9335 - DNA, 22 bp, Artificial Sequence
  Description of Artificial Sequence: Synthetic oligonucleotide
atttgccatcagggcccagggc

SEQ ID NO: 9336 - DNA, 22 bp, Artificial Sequence
  Description of Artificial Sequence: Synthetic oligonucleotide
tattgacctgtctataatgggc

SEQ ID NO: 9337 - DNA, 22 bp, Artificial Sequence
  Description of Artificial Sequence: Synthetic oligonucleotide
tattcatatcctcttcgatctc

SEQ ID NO: 9338 - DNA, 22 bp, Artificial Sequence
  Description of Artificial Sequence: Synthetic oligonucleotide
taaccaaatcccgacaggaggc

SEQ ID NO: 9339 - DNA, 22 bp, Artificial Sequence
  Description of Artificial Sequence: Synthetic oligonucleotide
atgaaataaggaatgatggcca

SEQ ID NO: 9340 - DNA, 22 bp, Artificial Sequence
  Description of Artificial Sequence: Synthetic oligonucleotide
aattcttcgaatcatctggccg

SEQ ID NO: 9341 - DNA, 22 bp, Artificial Sequence
  Description of Artificial Sequence: Synthetic oligonucleotide
attaggctggacaatgcctgcc

SEQ ID NO: 9342 - DNA, 22 bp, Artificial Sequence
  Description of Artificial Sequence: Synthetic oligonucleotide
taagcatcaacaatgagctgga

SEQ ID NO: 9343 - DNA, 22 bp, Artificial Sequence
  Description of Artificial Sequence: Synthetic oligonucleotide
ttattccatctgccttgctggt

SEQ ID NO: 9344 - DNA, 22 bp, Artificial Sequence
  Description of Artificial Sequence: Synthetic oligonucleotide
atagttactgaatctgagaggg

SEQ ID NO: 9345 - DNA, 22 bp, Artificial Sequence
  Description of Artificial Sequence: Synthetic oligonucleotide
tttctgaatattaatcacaggc

SEQ ID NO: 9346 - DNA, 22 bp, Artificial Sequence
  Description of Artificial Sequence: Synthetic oligonucleotide
tttagaaacaatacctttccct

SEQ ID NO: 9347 - DNA, 22 bp, Artificial Sequence
  Description of Artificial Sequence: Synthetic oligonucleotide
tttgcatatacaataatcagct

SEQ ID NO: 9348 - DNA, 22 bp, Artificial Sequence
  Description of Artificial Sequence: Synthetic oligonucleotide
ttatttacagaacagatttggg

SEQ ID NO: 9349 - DNA, 22 bp, Artificial Sequence
  Description of Artificial Sequence: Synthetic oligonucleotide
ttgtgatattgaatcactggct

SEQ ID NO: 9350 - DNA, 22 bp, Artificial Sequence
  Description of Artificial Sequence: Synthetic oligonucleotide
ataattcgatagttggcatgca

SEQ ID NO: 9351 - DNA, 22 bp, Artificial Sequence
  Description of Artificial Sequence: Synthetic oligonucleotide
atagcaatttgtcttgaggcgc

SEQ ID NO: 9352 - DNA, 22 bp, Artificial Sequence
  Description of Artificial Sequence: Synthetic oligonucleotide
tattcacatgcaaagtagtcct

SEQ ID NO: 9353 - DNA, 22 bp, Artificial Sequence
  Description of Artificial Sequence: Synthetic oligonucleotide
gttcacaaaggctgcggctggg

SEQ ID NO: 9354 - DNA, 22 bp, Artificial Sequence
  Description of Artificial Sequence: Synthetic oligonucleotide
ttgaattgccagcacatgcgca

SEQ ID NO: 9355 - DNA, 22 bp, Artificial Sequence
  Description of Artificial Sequence: Synthetic oligonucleotide
attagacaggccttggtaaggc

SEQ ID NO: 9356 - DNA, 22 bp, Artificial Sequence
  Description of Artificial Sequence: Synthetic oligonucleotide
ataaatgatgtcactcttggcc

SEQ ID NO: 9357 - DNA, 22 bp, Artificial Sequence
  Description of Artificial Sequence: Synthetic oligonucleotide
atttagcacaagattatcagcc

SEQ ID NO: 9358 - DNA, 22 bp, Artificial Sequence
  Description of Artificial Sequence: Synthetic oligonucleotide
atattccatcagtgatttagca

SEQ ID NO: 9359 - DNA, 22 bp, Artificial Sequence
  Description of Artificial Sequence: Synthetic oligonucleotide
ataaatagtctcagggccactg

SEQ ID NO: 9360 - DNA, 22 bp, Artificial Sequence
  Description of Artificial Sequence: Synthetic oligonucleotide
atatgaactaagtttgtgtggt

SEQ ID NO: 9361 - DNA, 22 bp, Artificial Sequence
  Description of Artificial Sequence: Synthetic oligonucleotide
atagtcaaagagatcctgggcg

SEQ ID NO: 9362 - DNA, 22 bp, Artificial Sequence
  Description of Artificial Sequence: Synthetic oligonucleotide
atactggactttaatgactggt

SEQ ID NO: 9363 - DNA, 22 bp, Artificial Sequence
  Description of Artificial Sequence: Synthetic oligonucleotide
tttaggaacagagctgggaggc

SEQ ID NO: 9364 - DNA, 22 bp, Artificial Sequence
  Description of Artificial Sequence: Synthetic oligonucleotide
tataccaaccctgtggcctgct

SEQ ID NO: 9365 - DNA, 22 bp, Artificial Sequence
  Description of Artificial Sequence: Synthetic oligonucleotide
ttatccagacttgccatggcct

SEQ ID NO: 9366 - DNA, 22 bp, Artificial Sequence
  Description of Artificial Sequence: Synthetic oligonucleotide
aatatcatacacgataacagct

SEQ ID NO: 9367 - DNA, 22 bp, Artificial Sequence
  Description of Artificial Sequence: Synthetic oligonucleotide
aacaaggaaggttgtaaagcct

SEQ ID NO: 9368 - DNA, 22 bp, Artificial Sequence
  Description of Artificial Sequence: Synthetic oligonucleotide
ttaaataacggcacgaaactga

SEQ ID NO: 9369 - DNA, 22 bp, Artificial Sequence
  Description of Artificial Sequence: Synthetic oligonucleotide
ctttcaatacagaaatactcct

SEQ ID NO: 9370 - DNA, 22 bp, Artificial Sequence
  Description of Artificial Sequence: Synthetic oligonucleotide
atctctctgctgctgaggtggt

SEQ ID NO: 9371 - DNA, 22 bp, Artificial Sequence
  Description of Artificial Sequence: Synthetic oligonucleotide
ataccaataagtaccagcacct

SEQ ID NO: 9372 - DNA, 22 bp, Artificial Sequence
  Description of Artificial Sequence: Synthetic oligonucleotide
aacaagtagggatcacaggcca

SEQ ID NO: 9373 - DNA, 22 bp, Artificial Sequence
  Description of Artificial Sequence: Synthetic oligonucleotide
atccatgatcttcgaaagacca

SEQ ID NO: 9374 - DNA, 22 bp, Artificial Sequence
  Description of Artificial Sequence: Synthetic oligonucleotide
ttgaaggagccggagggctggg

SEQ ID NO: 9375 - DNA, 22 bp, Artificial Sequence
  Description of Artificial Sequence: Synthetic oligonucleotide
ttattaagtggaatagtctggt

SEQ ID NO: 9376 - DNA, 22 bp, Artificial Sequence
  Description of Artificial Sequence: Synthetic oligonucleotide
tttgggtatgtcctaaaggcgc

SEQ ID NO: 9377 - DNA, 22 bp, Artificial Sequence
  Description of Artificial Sequence: Synthetic oligonucleotide
tttcagacaaatcaaagacctg

SEQ ID NO: 9378 - DNA, 22 bp, Artificial Sequence
  Description of Artificial Sequence: Synthetic oligonucleotide
ttaaagtgtagaacagagacca

SEQ ID NO: 9379 - DNA, 22 bp, Artificial Sequence
  Description of Artificial Sequence: Synthetic oligonucleotide
ttatcatgtttataaggttggg

SEQ ID NO: 9380 - DNA, 22 bp, Artificial Sequence
  Description of Artificial Sequence: Synthetic oligonucleotide
ttgaccaaccagtgtggtgcct

SEQ ID NO: 9381 - DNA, 22 bp, Artificial Sequence
  Description of Artificial Sequence: Synthetic oligonucleotide
aggtaagatgatgtagagggtg

SEQ ID NO: 9382 - DNA, 22 bp, Artificial Sequence
  Description of Artificial Sequence: Synthetic oligonucleotide
attgtaaataagttaactgggc

SEQ ID NO: 9383 - DNA, 22 bp, Artificial Sequence
  Description of Artificial Sequence: Synthetic oligonucleotide
tataccagtgatgaatttccca

SEQ ID NO: 9384 - DNA, 22 bp, Artificial Sequence
  Description of Artificial Sequence: Synthetic oligonucleotide
tgaggattaaataaagcttggg

SEQ ID NO: 9385 - DNA, 22 bp, Artificial Sequence
  Description of Artificial Sequence: Synthetic oligonucleotide
attaaatcccatagcatgactg

SEQ ID NO: 9386 - DNA, 22 bp, Artificial Sequence
  Description of Artificial Sequence: Synthetic oligonucleotide
aatattcttcgtggactggcct

SEQ ID NO: 9387 - DNA, 22 bp, Artificial Sequence
  Description of Artificial Sequence: Synthetic oligonucleotide
attaataaacggaaggtgcctg

SEQ ID NO: 9388 - DNA, 22 bp, Artificial Sequence
  Description of Artificial Sequence: Synthetic oligonucleotide
tttaagtgtactgccatcagct

SEQ ID NO: 9389 - DNA, 22 bp, Artificial Sequence
  Description of Artificial Sequence: Synthetic oligonucleotide
ataatacaagctgtttgtatgt

SEQ ID NO: 9390 - DNA, 22 bp, Artificial Sequence
  Description of Artificial Sequence: Synthetic oligonucleotide
ataaattaccactgtgcgtgca

SEQ ID NO: 9391 - DNA, 22 bp, Artificial Sequence
  Description of Artificial Sequence: Synthetic oligonucleotide
tttagcaactatttcagctcgc

SEQ ID NO: 9392 - DNA, 22 bp, Artificial Sequence
  Description of Artificial Sequence: Synthetic oligonucleotide
attcctgaacatcatagagtgc

SEQ ID NO: 9393 - DNA, 22 bp, Artificial Sequence
  Description of Artificial Sequence: Synthetic oligonucleotide
tttctacagcacaattatagat

SEQ ID NO: 9394 - DNA, 22 bp, Artificial Sequence
  Description of Artificial Sequence: Synthetic oligonucleotide
ttagattaatgccaaagagctc

SEQ ID NO: 9395 - DNA, 22 bp, Artificial Sequence
  Description of Artificial Sequence: Synthetic oligonucleotide
atatagagacctataataccca

SEQ ID NO: 9396 - DNA, 22 bp, Artificial Sequence
  Description of Artificial Sequence: Synthetic oligonucleotide
ttagtgaatgactaaacaagga

SEQ ID NO: 9397 - DNA, 22 bp, Artificial Sequence
  Description of Artificial Sequence: Synthetic oligonucleotide
taatcaacaaatatagagacct

SEQ ID NO: 9398 - DNA, 22 bp, Artificial Sequence
  Description of Artificial Sequence: Synthetic oligonucleotide
aattccatccagaaatggacca

SEQ ID NO: 9399 - DNA, 22 bp, Artificial Sequence
  Description of Artificial Sequence: Synthetic oligonucleotide
atatcttcttgttctgacagcc

SEQ ID NO: 9400 - DNA, 22 bp, Artificial Sequence
  Description of Artificial Sequence: Synthetic oligonucleotide
ttacaataggactgtagagcca

SEQ ID NO: 9401 - DNA, 22 bp, Artificial Sequence
  Description of Artificial Sequence: Synthetic oligonucleotide
atttgtcaatatctccaaaggc

SEQ ID NO: 9402 - DNA, 22 bp, Artificial Sequence
  Description of Artificial Sequence: Synthetic oligonucleotide
cccatagatgagggacagggcg

SEQ ID NO: 9403 - DNA, 22 bp, Artificial Sequence
  Description of Artificial Sequence: Synthetic oligonucleotide
attctgttgaagattcactggg

SEQ ID NO: 9404 - DNA, 22 bp, Artificial Sequence
  Description of Artificial Sequence: Synthetic oligonucleotide
tttagagatgtcagaagatggc

SEQ ID NO: 9405 - DNA, 22 bp, Artificial Sequence
  Description of Artificial Sequence: Synthetic oligonucleotide
tttgaggaacagtaagtatggg

SEQ ID NO: 9406 - DNA, 22 bp, Artificial Sequence
  Description of Artificial Sequence: Synthetic oligonucleotide
ttctgcaaactgtatctcaggg

SEQ ID NO: 9407 - DNA, 22 bp, Artificial Sequence
  Description of Artificial Sequence: Synthetic oligonucleotide
ttcgagaatatgatgctgtggg

SEQ ID NO: 9408 - DNA, 22 bp, Artificial Sequence
  Description of Artificial Sequence: Synthetic oligonucleotide
atctgccatgaaataatgccca

SEQ ID NO: 9409 - DNA, 22 bp, Artificial Sequence
  Description of Artificial Sequence: Synthetic oligonucleotide
ttgaaataacagcctataggta

SEQ ID NO: 9410 - DNA, 22 bp, Artificial Sequence
  Description of Artificial Sequence: Synthetic oligonucleotide
aattacactaaacgtgtctgta

SEQ ID NO: 9411 - DNA, 22 bp, Artificial Sequence
  Description of Artificial Sequence: Synthetic oligonucleotide
ttagggtagaacagtatcttgt

SEQ ID NO: 9412 - DNA, 22 bp, Artificial Sequence
  Description of Artificial Sequence: Synthetic oligonucleotide
atgatcaatgaagaagggccgg

SEQ ID NO: 9413 - DNA, 22 bp, Artificial Sequence
  Description of Artificial Sequence: Synthetic oligonucleotide
ttccagaaccactgaatgacgg

SEQ ID NO: 9414 - DNA, 22 bp, Artificial Sequence
  Description of Artificial Sequence: Synthetic oligonucleotide
atgaagaaaccatctaagagct

SEQ ID NO: 9415 - DNA, 22 bp, Artificial Sequence
  Description of Artificial Sequence: Synthetic oligonucleotide
tatgattgacatagtatgtgcg

SEQ ID NO: 9416 - DNA, 22 bp, Artificial Sequence
  Description of Artificial Sequence: Synthetic oligonucleotide
ttatgatcaatgaagaagggcc

SEQ ID NO: 9417 - DNA, 22 bp, Artificial Sequence
  Description of Artificial Sequence: Synthetic oligonucleotide
aatgatcctcattacagaggcc

SEQ ID NO: 9418 - DNA, 22 bp, Artificial Sequence
  Description of Artificial Sequence: Synthetic oligonucleotide
ttagctacataaatcctgtccc

SEQ ID NO: 9419 - DNA, 22 bp, Artificial Sequence
  Description of Artificial Sequence: Synthetic oligonucleotide
tttgtgattgattctcttatct

SEQ ID NO: 9420 - DNA, 22 bp, Artificial Sequence
  Description of Artificial Sequence: Synthetic oligonucleotide
tttatggtgcaggctctgcttc

SEQ ID NO: 9421 - DNA, 22 bp, Artificial Sequence
  Description of Artificial Sequence: Synthetic oligonucleotide
aatgttcagcagttctctcggg

SEQ ID NO: 9422 - DNA, 22 bp, Artificial Sequence
  Description of Artificial Sequence: Synthetic oligonucleotide
gaaagtttgaagattccctggc

SEQ ID NO: 9423 - DNA, 22 bp, Artificial Sequence
  Description of Artificial Sequence: Synthetic oligonucleotide
aagagcaaacaagttccgttgg

SEQ ID NO: 9424 - DNA, 22 bp, Artificial Sequence
  Description of Artificial Sequence: Synthetic oligonucleotide
tctcattagttcagcattcccg

SEQ ID NO: 9425 - DNA, 22 bp, Artificial Sequence
  Description of Artificial Sequence: Synthetic oligonucleotide
ttgccgtatcaaagtagtggcc

SEQ ID NO: 9426 - DNA, 22 bp, Artificial Sequence
  Description of Artificial Sequence: Synthetic oligonucleotide
taatcacatcaatatttgtgtg

SEQ ID NO: 9427 - DNA, 22 bp, Artificial Sequence
  Description of Artificial Sequence: Synthetic oligonucleotide
ttaaagctacagctatagagac

SEQ ID NO: 9428 - DNA, 22 bp, Artificial Sequence
  Description of Artificial Sequence: Synthetic oligonucleotide
gtttcctaagcaaatactgcct

SEQ ID NO: 9429 - DNA, 22 bp, Artificial Sequence
  Description of Artificial Sequence: Synthetic oligonucleotide
ataagttagaggaaccaatgag

SEQ ID NO: 9430 - DNA, 22 bp, Artificial Sequence
  Description of Artificial Sequence: Synthetic oligonucleotide
aattatcatcaggtgagggtag

SEQ ID NO: 9431 - DNA, 22 bp, Artificial Sequence
  Description of Artificial Sequence: Synthetic oligonucleotide
atctatattaagtttctctgcc

SEQ ID NO: 9432 - DNA, 22 bp, Artificial Sequence
  Description of Artificial Sequence: Synthetic oligonucleotide
caaatcgatgaccttcatgggc

SEQ ID NO: 9433 - DNA, 22 bp, Artificial Sequence
  Description of Artificial Sequence: Synthetic oligonucleotide
tttggttgggttcataggaggt

SEQ ID NO: 9434 - DNA, 22 bp, Artificial Sequence
  Description of Artificial Sequence: Synthetic oligonucleotide
tttcagaagtctctacagtctt

SEQ ID NO: 9435 - DNA, 22 bp, Artificial Sequence
  Description of Artificial Sequence: Synthetic oligonucleotide
aatgctaaagagttacagcgct

SEQ ID NO: 9436 - DNA, 22 bp, Artificial Sequence
  Description of Artificial Sequence: Synthetic oligonucleotide
tttatgattcagcctcttcgga

SEQ ID NO: 9437 - DNA, 22 bp, Artificial Sequence
  Description of Artificial Sequence: Synthetic oligonucleotide
atatactgtcctatacttccct

SEQ ID NO: 9438 - DNA, 22 bp, Artificial Sequence
  Description of Artificial Sequence: Synthetic oligonucleotide
atttggaaccttaatccaaggg

SEQ ID NO: 9439 - DNA, 22 bp, Artificial Sequence
  Description of Artificial Sequence: Synthetic oligonucleotide
cgaagatacgggacacgtggcg

SEQ ID NO: 9440 - DNA, 22 bp, Artificial Sequence
  Description of Artificial Sequence: Synthetic oligonucleotide
gtagtagaagtcgtaggtgcgc

SEQ ID NO: 9441 - DNA, 22 bp, Artificial Sequence
  Description of Artificial Sequence: Synthetic oligonucleotide
tttcggatagagatctgtggca

SEQ ID NO: 9442 - DNA, 22 bp, Artificial Sequence
  Description of Artificial Sequence: Synthetic oligonucleotide
tttctatgtcacttgaatccct

SEQ ID NO: 9443 - DNA, 22 bp, Artificial Sequence
  Description of Artificial Sequence: Synthetic oligonucleotide
ttcttgcaggagacgagctggc

SEQ ID NO: 9444 - DNA, 22 bp, Artificial Sequence
  Description of Artificial Sequence: Synthetic oligonucleotide
tttatcacaaacatttaaccgt

SEQ ID NO: 9445 - DNA, 22 bp, Artificial Sequence
  Description of Artificial Sequence: Synthetic oligonucleotide
ttaggctaagtcagtaactgtg

SEQ ID NO: 9446 - DNA, 22 bp, Artificial Sequence
  Description of Artificial Sequence: Synthetic oligonucleotide
ttcacagatgccataatctggt

SEQ ID NO: 9447 - DNA, 22 bp, Artificial Sequence
  Description of Artificial Sequence: Synthetic oligonucleotide
ataaggtcagagtgacctggtg

SEQ ID NO: 9448 - DNA, 22 bp, Artificial Sequence
  Description of Artificial Sequence: Synthetic oligonucleotide
taaatgccacaatcacgcgggc

SEQ ID NO: 9449 - DNA, 22 bp, Artificial Sequence
  Description of Artificial Sequence: Synthetic oligonucleotide
ataaataacagagttggcggcg

SEQ ID NO: 9450 - DNA, 22 bp, Artificial Sequence
  Description of Artificial Sequence: Synthetic oligonucleotide
atactatttgcacttaattgga

SEQ ID NO: 9451 - DNA, 22 bp, Artificial Sequence
  Description of Artificial Sequence: Synthetic oligonucleotide
tataacctctaactaaattcct

SEQ ID NO: 9452 - DNA, 22 bp, Artificial Sequence
  Description of Artificial Sequence: Synthetic oligonucleotide
ttcacagtacacatataaagct

SEQ ID NO: 9453 - DNA, 22 bp, Artificial Sequence
  Description of Artificial Sequence: Synthetic oligonucleotide
acatctcaatccataatcactc

SEQ ID NO: 9454 - DNA, 22 bp, Artificial Sequence
  Description of Artificial Sequence: Synthetic oligonucleotide
taaagacatctctttgactcct

SEQ ID NO: 9455 - DNA, 22 bp, Artificial Sequence
  Description of Artificial Sequence: Synthetic oligonucleotide
aatacccatcagagacagtgac

SEQ ID NO: 9456 - DNA, 22 bp, Artificial Sequence
  Description of Artificial Sequence: Synthetic oligonucleotide
atactcaagcagactttcccat

SEQ ID NO: 9457 - DNA, 22 bp, Artificial Sequence
  Description of Artificial Sequence: Synthetic oligonucleotide
atacagtcagatataaagacat

SEQ ID NO: 9458 - DNA, 22 bp, Artificial Sequence
  Description of Artificial Sequence: Synthetic oligonucleotide
taaagcttactgatcagcagcc

SEQ ID NO: 9459 - DNA, 22 bp, Artificial Sequence
  Description of Artificial Sequence: Synthetic oligonucleotide
taaagttgagagatcatctcca

SEQ ID NO: 9460 - DNA, 22 bp, Artificial Sequence
  Description of Artificial Sequence: Synthetic oligonucleotide
taaatcaaggtcataacctggt

SEQ ID NO: 9461 - DNA, 22 bp, Artificial Sequence
  Description of Artificial Sequence: Synthetic oligonucleotide
atatcctacaacaaacttgtct

SEQ ID NO: 9462 - DNA, 22 bp, Artificial Sequence
  Description of Artificial Sequence: Synthetic oligonucleotide
tttattaatgaccgtgtaacca

SEQ ID NO: 9463 - DNA, 22 bp, Artificial Sequence
  Description of Artificial Sequence: Synthetic oligonucleotide
ttatggtagcaatgttccagtc

SEQ ID NO: 9464 - DNA, 22 bp, Artificial Sequence
  Description of Artificial Sequence: Synthetic oligonucleotide
caaaccatgcaaagtggcaggg

SEQ ID NO: 9465 - DNA, 22 bp, Artificial Sequence
  Description of Artificial Sequence: Synthetic oligonucleotide
atcagtaacaacatcagtgctg

SEQ ID NO: 9466 - DNA, 22 bp, Artificial Sequence
  Description of Artificial Sequence: Synthetic oligonucleotide
tttggcaaagatgtcagggcct

SEQ ID NO: 9467 - DNA, 22 bp, Artificial Sequence
  Description of Artificial Sequence: Synthetic oligonucleotide
ataccatggcacatggcctggt

SEQ ID NO: 9468 - DNA, 22 bp, Artificial Sequence
  Description of Artificial Sequence: Synthetic oligonucleotide
ctaaagtacagtgtcacttgct

SEQ ID NO: 9469 - DNA, 22 bp, Artificial Sequence
  Description of Artificial Sequence: Synthetic oligonucleotide
atagatggtgccaaagagtggg

SEQ ID NO: 9470 - DNA, 22 bp, Artificial Sequence
  Description of Artificial Sequence: Synthetic oligonucleotide
tttcacattgccaccgttggtg

SEQ ID NO: 9471 - DNA, 22 bp, Artificial Sequence
  Description of Artificial Sequence: Synthetic oligonucleotide
gtacagaatgatgtagctgtcg

SEQ ID NO: 9472 - DNA, 22 bp, Artificial Sequence
  Description of Artificial Sequence: Synthetic oligonucleotide
ttatagaagtccatcacatctc

SEQ ID NO: 9473 - DNA, 22 bp, Artificial Sequence
  Description of Artificial Sequence: Synthetic oligonucleotide
aataaattgcatgtaaagctgc

SEQ ID NO: 9474 - DNA, 22 bp, Artificial Sequence
  Description of Artificial Sequence: Synthetic oligonucleotide
attaataatcagatcaggagca

SEQ ID NO: 9475 - DNA, 22 bp, Artificial Sequence
  Description of Artificial Sequence: Synthetic oligonucleotide
ttaatgtgtaacatttcaggca

SEQ ID NO: 9476 - DNA, 22 bp, Artificial Sequence
  Description of Artificial Sequence: Synthetic oligonucleotide
ttacatagtaagaaacatcctg

SEQ ID NO: 9477 - DNA, 22 bp, Artificial Sequence
  Description of Artificial Sequence: Synthetic oligonucleotide
ttatggaataccactttctgga

SEQ ID NO: 9478 - DNA, 22 bp, Artificial Sequence
  Description of Artificial Sequence: Synthetic oligonucleotide
ttaatgtagggatgtggagggc

SEQ ID NO: 9479 - DNA, 22 bp, Artificial Sequence
  Description of Artificial Sequence: Synthetic oligonucleotide
tttatatggtgcacaagctgct

SEQ ID NO: 9480 - DNA, 22 bp, Artificial Sequence
  Description of Artificial Sequence: Synthetic oligonucleotide
taatgtaaacaccatattggcc

SEQ ID NO: 9481 - DNA, 22 bp, Artificial Sequence
  Description of Artificial Sequence: Synthetic oligonucleotide
ctagatctccaggtcatcaggc

SEQ ID NO: 9482 - DNA, 22 bp, Artificial Sequence
  Description of Artificial Sequence: Synthetic oligonucleotide
tttaaataccaacatgcacctc

SEQ ID NO: 9483 - DNA, 22 bp, Artificial Sequence
  Description of Artificial Sequence: Synthetic oligonucleotide
ttcagtaatagcattactgcta

SEQ ID NO: 9484 - DNA, 22 bp, Artificial Sequence
  Description of Artificial Sequence: Synthetic oligonucleotide
ttagtttcataattggagacgc

SEQ ID NO: 9485 - DNA, 22 bp, Artificial Sequence
  Description of Artificial Sequence: Synthetic oligonucleotide
aattgattccagcgagaaaggt

SEQ ID NO: 9486 - DNA, 22 bp, Artificial Sequence
  Description of Artificial Sequence: Synthetic oligonucleotide
ttagagttggtgatgagcacgg

SEQ ID NO: 9487 - DNA, 22 bp, Artificial Sequence
  Description of Artificial Sequence: Synthetic oligonucleotide
tagtcgtctctgagtgagcggt

SEQ ID NO: 9488 - DNA, 22 bp, Artificial Sequence
  Description of Artificial Sequence: Synthetic oligonucleotide
catagtcgtctctgagtgagcg

SEQ ID NO: 9489 - DNA, 22 bp, Artificial Sequence
  Description of Artificial Sequence: Synthetic oligonucleotide
atatctattctgagaaggagtt

SEQ ID NO: 9490 - DNA, 22 bp, Artificial Sequence
  Description of Artificial Sequence: Synthetic oligonucleotide
tatttcactggcaatcaggcag

SEQ ID NO: 9491 - DNA, 22 bp, Artificial Sequence
  Description of Artificial Sequence: Synthetic oligonucleotide
tttcagtgtcatgaaatacccg

SEQ ID NO: 9492 - DNA, 22 bp, Artificial Sequence
  Description of Artificial Sequence: Synthetic oligonucleotide
ttaagtattaagagtttcctct

SEQ ID NO: 9493 - DNA, 22 bp, Artificial Sequence
  Description of Artificial Sequence: Synthetic oligonucleotide
aatatacgtcgcatgaactcat

SEQ ID NO: 9494 - DNA, 22 bp, Artificial Sequence
  Description of Artificial Sequence: Synthetic oligonucleotide
atagctttacaaatatacaggt

SEQ ID NO: 9495 - DNA, 22 bp, Artificial Sequence
  Description of Artificial Sequence: Synthetic oligonucleotide
aatatcttcactggaatcacct

SEQ ID NO: 9496 - DNA, 22 bp, Artificial Sequence
  Description of Artificial Sequence: Synthetic oligonucleotide
aaggaccagacgtcactctggt

SEQ ID NO: 9497 - DNA, 22 bp, Artificial Sequence
  Description of Artificial Sequence: Synthetic oligonucleotide
taaaccttgcagacaaactcta

SEQ ID NO: 9498 - DNA, 22 bp, Artificial Sequence
  Description of Artificial Sequence: Synthetic oligonucleotide
caactatgacatagagaggccc

SEQ ID NO: 9499 - DNA, 22 bp, Artificial Sequence
  Description of Artificial Sequence: Synthetic oligonucleotide
atatccaacaaagtcatctgct

SEQ ID NO: 9500 - DNA, 22 bp, Artificial Sequence
  Description of Artificial Sequence: Synthetic oligonucleotide
tattgtcatctgtgtctgagcc

SEQ ID NO: 9501 - DNA, 22 bp, Artificial Sequence
  Description of Artificial Sequence: Synthetic oligonucleotide
aataggatactgagcatctggt

SEQ ID NO: 9502 - DNA, 22 bp, Artificial Sequence
  Description of Artificial Sequence: Synthetic oligonucleotide
attgaagttgagtgaaagaggc

SEQ ID NO: 9503 - DNA, 22 bp, Artificial Sequence
  Description of Artificial Sequence: Synthetic oligonucleotide
ttatggctagccactgggacca

SEQ ID NO: 9504 - DNA, 22 bp, Artificial Sequence
  Description of Artificial Sequence: Synthetic oligonucleotide
atttctgtggaggctggtaggc

SEQ ID NO: 9505 - DNA, 22 bp, Artificial Sequence
  Description of Artificial Sequence: Synthetic oligonucleotide
tttcactgtcaccatgaaggca

SEQ ID NO: 9506 - DNA, 22 bp, Artificial Sequence
  Description of Artificial Sequence: Synthetic oligonucleotide
ataaactgttgattcatctcca

SEQ ID NO: 9507 - DNA, 22 bp, Artificial Sequence
  Description of Artificial Sequence: Synthetic oligonucleotide
taaacgtatgaggcttaacctg

SEQ ID NO: 9508 - DNA, 22 bp, Artificial Sequence
  Description of Artificial Sequence: Synthetic oligonucleotide
ttattggtcagaattaagacca

SEQ ID NO: 9509 - DNA, 22 bp, Artificial Sequence
  Description of Artificial Sequence: Synthetic oligonucleotide
ttcgtttagaatctgaaagcct

SEQ ID NO: 9510 - DNA, 22 bp, Artificial Sequence
  Description of Artificial Sequence: Synthetic oligonucleotide
tttggaactgagtctgtgggct

SEQ ID NO: 9511 - DNA, 22 bp, Artificial Sequence
  Description of Artificial Sequence: Synthetic oligonucleotide
atatcttgccattcatggagcg

SEQ ID NO: 9512 - DNA, 22 bp, Artificial Sequence
  Description of Artificial Sequence: Synthetic oligonucleotide
ttaatggctgaaagagtccggg

SEQ ID NO: 9513 - DNA, 22 bp, Artificial Sequence
  Description of Artificial Sequence: Synthetic oligonucleotide
attcattgagaatttccatggc

SEQ ID NO: 9514 - DNA, 22 bp, Artificial Sequence
  Description of Artificial Sequence: Synthetic oligonucleotide
tttacttcagctcctttagcct

SEQ ID NO: 9515 - DNA, 22 bp, Artificial Sequence
  Description of Artificial Sequence: Synthetic oligonucleotide
attgtatctcgtaatcagtggc

SEQ ID NO: 9516 - DNA, 22 bp, Artificial Sequence
  Description of Artificial Sequence: Synthetic oligonucleotide
tttgcctttcacataactagct

SEQ ID NO: 9517 - DNA, 22 bp, Artificial Sequence
  Description of Artificial Sequence: Synthetic oligonucleotide
atattggatccctgatcatctg

SEQ ID NO: 9518 - DNA, 22 bp, Artificial Sequence
  Description of Artificial Sequence: Synthetic oligonucleotide
taagtcttgagtctgcactggt

SEQ ID NO: 9519 - DNA, 22 bp, Artificial Sequence
  Description of Artificial Sequence: Synthetic oligonucleotide
gttccataagtcttgagtctgc

SEQ ID NO: 9520 - DNA, 22 bp, Artificial Sequence
  Description of Artificial Sequence: Synthetic oligonucleotide
tttcgtgatcaccttgaagcta

SEQ ID NO: 9521 - DNA, 22 bp, Artificial Sequence
  Description of Artificial Sequence: Synthetic oligonucleotide
gtactcatgcacatgggttggt

SEQ ID NO: 9522 - DNA, 22 bp, Artificial Sequence
  Description of Artificial Sequence: Synthetic oligonucleotide
tttgcttgtgaaagtctctgtg

SEQ ID NO: 9523 - DNA, 22 bp, Artificial Sequence
  Description of Artificial Sequence: Synthetic oligonucleotide
attcctcttgaatgaagtccgt

SEQ ID NO: 9524 - DNA, 22 bp, Artificial Sequence
  Description of Artificial Sequence: Synthetic oligonucleotide
ttcaggttccagatgtggcgga

SEQ ID NO: 9525 - DNA, 22 bp, Artificial Sequence
  Description of Artificial Sequence: Synthetic oligonucleotide
tttagtaccagggtcatggcgt

SEQ ID NO: 9526 - DNA, 22 bp, Artificial Sequence
  Description of Artificial Sequence: Synthetic oligonucleotide
ttgcttgtgcaaccagacaggt

SEQ ID NO: 9527 - DNA, 22 bp, Artificial Sequence
  Description of Artificial Sequence: Synthetic oligonucleotide
atgaagtgagacaatgctggcc

SEQ ID NO: 9528 - DNA, 22 bp, Artificial Sequence
  Description of Artificial Sequence: Synthetic oligonucleotide
attccataactcgtcccatgtc

SEQ ID NO: 9529 - DNA, 22 bp, Artificial Sequence
  Description of Artificial Sequence: Synthetic oligonucleotide
atttaactccagggcatctgct

SEQ ID NO: 9530 - DNA, 22 bp, Artificial Sequence
  Description of Artificial Sequence: Synthetic oligonucleotide
tttaatatcaagattagttgga

SEQ ID NO: 9531 - DNA, 22 bp, Artificial Sequence
  Description of Artificial Sequence: Synthetic oligonucleotide
atttataaacttcaatccggcc

SEQ ID NO: 9532 - DNA, 22 bp, Artificial Sequence
  Description of Artificial Sequence: Synthetic oligonucleotide
tttctgtaggacacacaaaggt

SEQ ID NO: 9533 - DNA, 22 bp, Artificial Sequence
  Description of Artificial Sequence: Synthetic oligonucleotide
ttaagtctggaaacttgttggc

SEQ ID NO: 9534 - DNA, 22 bp, Artificial Sequence
  Description of Artificial Sequence: Synthetic oligonucleotide
attccagagcatgatatctccc

SEQ ID NO: 9535 - DNA, 22 bp, Artificial Sequence
  Description of Artificial Sequence: Synthetic oligonucleotide
aattaggatctgggtatcggcc

SEQ ID NO: 9536 - DNA, 22 bp, Artificial Sequence
  Description of Artificial Sequence: Synthetic oligonucleotide
ttgtaatatccggtaagaatcc

SEQ ID NO: 9537 - DNA, 22 bp, Artificial Sequence
  Description of Artificial Sequence: Synthetic oligonucleotide
atcaaataactgcttgatccct

SEQ ID NO: 9538 - DNA, 22 bp, Artificial Sequence
  Description of Artificial Sequence: Synthetic oligonucleotide
ataagaacacatcttaggatct

SEQ ID NO: 9539 - DNA, 22 bp, Artificial Sequence
  Description of Artificial Sequence: Synthetic oligonucleotide
atataataattcattgggccct

SEQ ID NO: 9540 - DNA, 22 bp, Artificial Sequence
  Description of Artificial Sequence: Synthetic oligonucleotide
atttatgctcaccttaaacgct

SEQ ID NO: 9541 - DNA, 22 bp, Artificial Sequence
  Description of Artificial Sequence: Synthetic oligonucleotide
ttcattaagcgaactgatgcca

SEQ ID NO: 9542 - DNA, 22 bp, Artificial Sequence
  Description of Artificial Sequence: Synthetic oligonucleotide
attctgtatgacattcaactca

SEQ ID NO: 9543 - DNA, 22 bp, Artificial Sequence
  Description of Artificial Sequence: Synthetic oligonucleotide
taaatctctcaggtaactgtta

SEQ ID NO: 9544 - DNA, 22 bp, Artificial Sequence
  Description of Artificial Sequence: Synthetic oligonucleotide
atataacacaagtaaagtggtg

SEQ ID NO: 9545 - DNA, 22 bp, Artificial Sequence
  Description of Artificial Sequence: Synthetic oligonucleotide
tttgttaatgaaggcctatcct

SEQ ID NO: 9546 - DNA, 22 bp, Artificial Sequence
  Description of Artificial Sequence: Synthetic oligonucleotide
tttctcttgtagcctggttctc

SEQ ID NO: 9547 - DNA, 22 bp, Artificial Sequence
  Description of Artificial Sequence: Synthetic oligonucleotide
tttatttcactcttgctgacgg

SEQ ID NO: 9548 - DNA, 22 bp, Artificial Sequence
  Description of Artificial Sequence: Synthetic oligonucleotide
tttatattacctacgtagagag

SEQ ID NO: 9549 - DNA, 22 bp, Artificial Sequence
  Description of Artificial Sequence: Synthetic oligonucleotide
atcatagcagacaaggcgggtc

SEQ ID NO: 9550 - DNA, 22 bp, Artificial Sequence
  Description of Artificial Sequence: Synthetic oligonucleotide
taaagtaatgatcttctgaccc

SEQ ID NO: 9551 - DNA, 22 bp, Artificial Sequence
  Description of Artificial Sequence: Synthetic oligonucleotide
tttgatttctgtattacaaggt

SEQ ID NO: 9552 - DNA, 22 bp, Artificial Sequence
  Description of Artificial Sequence: Synthetic oligonucleotide
atttcactcctaataactgccc

SEQ ID NO: 9553 - DNA, 22 bp, Artificial Sequence
  Description of Artificial Sequence: Synthetic oligonucleotide
ataccttctcacagtaacggca

SEQ ID NO: 9554 - DNA, 22 bp, Artificial Sequence
  Description of Artificial Sequence: Synthetic oligonucleotide
gaagaagtagatcttccctccg

SEQ ID NO: 9555 - DNA, 22 bp, Artificial Sequence
  Description of Artificial Sequence: Synthetic oligonucleotide
ttcaataagagcactaaaccgg

SEQ ID NO: 9556 - DNA, 22 bp, Artificial Sequence
  Description of Artificial Sequence: Synthetic oligonucleotide
ttccagaaacatcttcatctcc

SEQ ID NO: 9557 - DNA, 22 bp, Artificial Sequence
  Description of Artificial Sequence: Synthetic oligonucleotide
ttattattacctgcctagtgca

SEQ ID NO: 9558 - DNA, 22 bp, Artificial Sequence
  Description of Artificial Sequence: Synthetic oligonucleotide
attagaggtgatgggctgtcgg

SEQ ID NO: 9559 - DNA, 22 bp, Artificial Sequence
  Description of Artificial Sequence: Synthetic oligonucleotide
atgttgttacagtggacctgca

SEQ ID NO: 9560 - DNA, 22 bp, Artificial Sequence
  Description of Artificial Sequence: Synthetic oligonucleotide
ttctttgtggactccaggtggc

SEQ ID NO: 9561 - DNA, 22 bp, Artificial Sequence
  Description of Artificial Sequence: Synthetic oligonucleotide
aatactcagcaagggacacggg

SEQ ID NO: 9562 - DNA, 22 bp, Artificial Sequence
  Description of Artificial Sequence: Synthetic oligonucleotide
ttcatataagtctagatcaggg

SEQ ID NO: 9563 - DNA, 22 bp, Artificial Sequence
  Description of Artificial Sequence: Synthetic oligonucleotide
atataggtgcataataccatga

SEQ ID NO: 9564 - DNA, 22 bp, Artificial Sequence
  Description of Artificial Sequence: Synthetic oligonucleotide
ttagttcatctgggttggactt

SEQ ID NO: 9565 - DNA, 22 bp, Artificial Sequence
  Description of Artificial Sequence: Synthetic oligonucleotide
tatcagcaccatatattggttg

SEQ ID NO: 9566 - DNA, 22 bp, Artificial Sequence
  Description of Artificial Sequence: Synthetic oligonucleotide
ttatatgcaacagataggaggt

SEQ ID NO: 9567 - DNA, 22 bp, Artificial Sequence
  Description of Artificial Sequence: Synthetic oligonucleotide
ttaacctctctcttagatgctt

SEQ ID NO: 9568 - DNA, 22 bp, Artificial Sequence
  Description of Artificial Sequence: Synthetic oligonucleotide
attgactccaccatttcgtcgt

SEQ ID NO: 9569 - DNA, 22 bp, Artificial Sequence
  Description of Artificial Sequence: Synthetic oligonucleotide
atcactttgcacatatactctc

SEQ ID NO: 9570 - DNA, 22 bp, Artificial Sequence
  Description of Artificial Sequence: Synthetic oligonucleotide
tattctaatgggagactctgaa

SEQ ID NO: 9571 - DNA, 22 bp, Artificial Sequence
  Description of Artificial Sequence: Synthetic oligonucleotide
catatactctccagaatcagcc

SEQ ID NO: 9572 - DNA, 22 bp, Artificial Sequence
  Description of Artificial Sequence: Synthetic oligonucleotide
ttgaaataagggacagcggtcc

SEQ ID NO: 9573 - DNA, 22 bp, Artificial Sequence
  Description of Artificial Sequence: Synthetic oligonucleotide
attgactatcaatttgtatcac

SEQ ID NO: 9574 - DNA, 22 bp, Artificial Sequence
  Description of Artificial Sequence: Synthetic oligonucleotide
tttgttaatgttctcatgcgac

SEQ ID NO: 9575 - DNA, 22 bp, Artificial Sequence
  Description of Artificial Sequence: Synthetic oligonucleotide
ttattgacttccagcatttccc

SEQ ID NO: 9576 - DNA, 22 bp, Artificial Sequence
  Description of Artificial Sequence: Synthetic oligonucleotide
gtcagacagcacttcatatgcc

SEQ ID NO: 9577 - DNA, 22 bp, Artificial Sequence
  Description of Artificial Sequence: Synthetic oligonucleotide
atattctctgaggatggatgct

SEQ ID NO: 9578 - DNA, 22 bp, Artificial Sequence
  Description of Artificial Sequence: Synthetic oligonucleotide
taccattctggaactcttccgt

SEQ ID NO: 9579 - DNA, 22 bp, Artificial Sequence
  Description of Artificial Sequence: Synthetic oligonucleotide
tttcttgacgacaggcggcgta

SEQ ID NO: 9580 - DNA, 22 bp, Artificial Sequence
  Description of Artificial Sequence: Synthetic oligonucleotide
atacagtacccatatccgagac

SEQ ID NO: 9581 - DNA, 22 bp, Artificial Sequence
  Description of Artificial Sequence: Synthetic oligonucleotide
aatgacaaggacaatgcgtgtt

SEQ ID NO: 9582 - DNA, 22 bp, Artificial Sequence
  Description of Artificial Sequence: Synthetic oligonucleotide
tagttcagtcgcccaaagggca

SEQ ID NO: 9583 - DNA, 22 bp, Artificial Sequence
  Description of Artificial Sequence: Synthetic oligonucleotide
atgattcagaactgcctctctg

SEQ ID NO: 9584 - DNA, 22 bp, Artificial Sequence
  Description of Artificial Sequence: Synthetic oligonucleotide
ttaaacaacaggatgaacacag

SEQ ID NO: 9585 - DNA, 22 bp, Artificial Sequence
  Description of Artificial Sequence: Synthetic oligonucleotide
tacctaaagtagataacaaggc

SEQ ID NO: 9586 - DNA, 22 bp, Artificial Sequence
  Description of Artificial Sequence: Synthetic oligonucleotide
aatgactgtgatattgttctct

SEQ ID NO: 9587 - DNA, 22 bp, Artificial Sequence
  Description of Artificial Sequence: Synthetic oligonucleotide
aagtacaaagaagcaacttctc

SEQ ID NO: 9588 - DNA, 22 bp, Artificial Sequence
  Description of Artificial Sequence: Synthetic oligonucleotide
atactcgtacaggtccacggcg

SEQ ID NO: 9589 - DNA, 22 bp, Artificial Sequence
  Description of Artificial Sequence: Synthetic oligonucleotide
taaagcactcacataaatccat

SEQ ID NO: 9590 - DNA, 22 bp, Artificial Sequence
  Description of Artificial Sequence: Synthetic oligonucleotide
tttcttcacaaatttgactccc

SEQ ID NO: 9591 - DNA, 22 bp, Artificial Sequence
  Description of Artificial Sequence: Synthetic oligonucleotide
atttcaatccagtagccatcag

SEQ ID NO: 9592 - DNA, 22 bp, Artificial Sequence
  Description of Artificial Sequence: Synthetic oligonucleotide
atcttgaatcacattgtttcct

SEQ ID NO: 9593 - DNA, 22 bp, Artificial Sequence
  Description of Artificial Sequence: Synthetic oligonucleotide
taagacaaacaggaacacttca

SEQ ID NO: 9594 - DNA, 22 bp, Artificial Sequence
  Description of Artificial Sequence: Synthetic oligonucleotide
attaaataagtggtactctgtg

SEQ ID NO: 9595 - DNA, 22 bp, Artificial Sequence
  Description of Artificial Sequence: Synthetic oligonucleotide
atatctacccactgtaatggta

SEQ ID NO: 9596 - DNA, 22 bp, Artificial Sequence
  Description of Artificial Sequence: Synthetic oligonucleotide
ttaatgtatgtcataagctcaa

SEQ ID NO: 9597 - DNA, 22 bp, Artificial Sequence
  Description of Artificial Sequence: Synthetic oligonucleotide
atatcctatcctagaaacattc

SEQ ID NO: 9598 - DNA, 22 bp, Artificial Sequence
  Description of Artificial Sequence: Synthetic oligonucleotide
tatgtccatcctgtaaagacag

SEQ ID NO: 9599 - DNA, 22 bp, Artificial Sequence
  Description of Artificial Sequence: Synthetic oligonucleotide
tatacccttgagcttctaaccg

SEQ ID NO: 9600 - DNA, 22 bp, Artificial Sequence
  Description of Artificial Sequence: Synthetic oligonucleotide
aatgtgatccaaataatctggt

SEQ ID NO: 9601 - DNA, 22 bp, Artificial Sequence
  Description of Artificial Sequence: Synthetic oligonucleotide
ttatcctttccgcctttgtccc

SEQ ID NO: 9602 - DNA, 22 bp, Artificial Sequence
  Description of Artificial Sequence: Synthetic oligonucleotide
tttcaagtgaagtaatcgacgg

SEQ ID NO: 9603 - DNA, 22 bp, Artificial Sequence
  Description of Artificial Sequence: Synthetic oligonucleotide
tttctggtagaggatcttccgc

SEQ ID NO: 9604 - DNA, 22 bp, Artificial Sequence
  Description of Artificial Sequence: Synthetic oligonucleotide
ttatgagatcagctttggtcat

SEQ ID NO: 9605 - DNA, 22 bp, Artificial Sequence
  Description of Artificial Sequence: Synthetic oligonucleotide
atttcttgtaattctccttgtc

SEQ ID NO: 9606 - DNA, 22 bp, Artificial Sequence
  Description of Artificial Sequence: Synthetic oligonucleotide
atgatgagggacatgagttggg

SEQ ID NO: 9607 - DNA, 22 bp, Artificial Sequence
  Description of Artificial Sequence: Synthetic oligonucleotide
tttggtcatgccaatgcctgtg

SEQ ID NO: 9608 - DNA, 22 bp, Artificial Sequence
  Description of Artificial Sequence: Synthetic oligonucleotide
atgctttagtaccagacttggc

SEQ ID NO: 9609 - DNA, 22 bp, Artificial Sequence
  Description of Artificial Sequence: Synthetic oligonucleotide
aatatatacagattcctgggca

SEQ ID NO: 9610 - DNA, 22 bp, Artificial Sequence
  Description of Artificial Sequence: Synthetic oligonucleotide
tataagctgcacttcttgtgga

SEQ ID NO: 9611 - DNA, 22 bp, Artificial Sequence
  Description of Artificial Sequence: Synthetic oligonucleotide
tacagtcagcatatttgcaggc

SEQ ID NO: 9612 - DNA, 22 bp, Artificial Sequence
  Description of Artificial Sequence: Synthetic oligonucleotide
atagcttggattataagctgca

SEQ ID NO: 9613 - DNA, 22 bp, Artificial Sequence
  Description of Artificial Sequence: Synthetic oligonucleotide
tttatcccacccatggagtcgt

SEQ ID NO: 9614 - DNA, 22 bp, Artificial Sequence
  Description of Artificial Sequence: Synthetic oligonucleotide
ttagagtttgaatatctttgcg

SEQ ID NO: 9615 - DNA, 22 bp, Artificial Sequence
  Description of Artificial Sequence: Synthetic oligonucleotide
taaacccaagagctgaagatgc

SEQ ID NO: 9616 - DNA, 22 bp, Artificial Sequence
  Description of Artificial Sequence: Synthetic oligonucleotide
ttatctgaaggacttgagatct

SEQ ID NO: 9617 - DNA, 22 bp, Artificial Sequence
  Description of Artificial Sequence: Synthetic oligonucleotide
tttcaaactgtccttctccttc

SEQ ID NO: 9618 - DNA, 22 bp, Artificial Sequence
  Description of Artificial Sequence: Synthetic oligonucleotide
atatccagttcctttagggcca

SEQ ID NO: 9619 - DNA, 22 bp, Artificial Sequence
  Description of Artificial Sequence: Synthetic oligonucleotide
tttcttgttgcaccaagaggca

SEQ ID NO: 9620 - DNA, 22 bp, Artificial Sequence
  Description of Artificial Sequence: Synthetic oligonucleotide
ttataaagtggacttgacacct

SEQ ID NO: 9621 - DNA, 22 bp, Artificial Sequence
  Description of Artificial Sequence: Synthetic oligonucleotide
ttataaataggtcttgccgtcc

SEQ ID NO: 9622 - DNA, 22 bp, Artificial Sequence
  Description of Artificial Sequence: Synthetic oligonucleotide
tattataaataggtcttgccgt

SEQ ID NO: 9623 - DNA, 22 bp, Artificial Sequence
  Description of Artificial Sequence: Synthetic oligonucleotide
ttccagaaactatataggactg

SEQ ID NO: 9624 - DNA, 22 bp, Artificial Sequence
  Description of Artificial Sequence: Synthetic oligonucleotide
ttagaatctgcttgtcggagct

SEQ ID NO: 9625 - DNA, 22 bp, Artificial Sequence
  Description of Artificial Sequence: Synthetic oligonucleotide
ttacacagtaacaccatgccat

SEQ ID NO: 9626 - DNA, 22 bp, Artificial Sequence
  Description of Artificial Sequence: Synthetic oligonucleotide
tattactagcaaactgacaccc

SEQ ID NO: 9627 - DNA, 22 bp, Artificial Sequence
  Description of Artificial Sequence: Synthetic oligonucleotide
atcacttaaactcatatctcct

SEQ ID NO: 9628 - DNA, 22 bp, Artificial Sequence
  Description of Artificial Sequence: Synthetic oligonucleotide
tataaagatatgataacgaggt

SEQ ID NO: 9629 - DNA, 22 bp, Artificial Sequence
  Description of Artificial Sequence: Synthetic oligonucleotide
aacaaatccaggtcccagtgcc

SEQ ID NO: 9630 - DNA, 22 bp, Artificial Sequence
  Description of Artificial Sequence: Synthetic oligonucleotide
tatatcatccacaggaagaggt

SEQ ID NO: 9631 - DNA, 22 bp, Artificial Sequence
  Description of Artificial Sequence: Synthetic oligonucleotide
atctggaatgaacaatggtggc

SEQ ID NO: 9632 - DNA, 22 bp, Artificial Sequence
  Description of Artificial Sequence: Synthetic oligonucleotide
tttaacttgaagattatggccg

SEQ ID NO: 9633 - DNA, 22 bp, Artificial Sequence
  Description of Artificial Sequence: Synthetic oligonucleotide
atagtcagcaagattcacaggc

SEQ ID NO: 9634 - DNA, 22 bp, Artificial Sequence
  Description of Artificial Sequence: Synthetic oligonucleotide
ttacttgtacaaatattctggg

SEQ ID NO: 9635 - DNA, 22 bp, Artificial Sequence
  Description of Artificial Sequence: Synthetic oligonucleotide
ttaatcaagcaggtctgcagct

SEQ ID NO: 9636 - DNA, 22 bp, Artificial Sequence
  Description of Artificial Sequence: Synthetic oligonucleotide
ttctggtttcacttggtcactc

SEQ ID NO: 9637 - DNA, 22 bp, Artificial Sequence
  Description of Artificial Sequence: Synthetic oligonucleotide
ataggtttaggctaactgactg

SEQ ID NO: 9638 - DNA, 22 bp, Artificial Sequence
  Description of Artificial Sequence: Synthetic oligonucleotide
ttaggctaactgactgattggt

SEQ ID NO: 9639 - DNA, 22 bp, Artificial Sequence
  Description of Artificial Sequence: Synthetic oligonucleotide
tttggttcatagcggatgcctt

SEQ ID NO: 9640 - DNA, 22 bp, Artificial Sequence
  Description of Artificial Sequence: Synthetic oligonucleotide
tttatggtagttgcaattgctg

SEQ ID NO: 9641 - DNA, 22 bp, Artificial Sequence
  Description of Artificial Sequence: Synthetic oligonucleotide
attcctcttgggactgtgacca

SEQ ID NO: 9642 - DNA, 22 bp, Artificial Sequence
  Description of Artificial Sequence: Synthetic oligonucleotide
tttcaggtacagccctttgcct

SEQ ID NO: 9643 - DNA, 22 bp, Artificial Sequence
  Description of Artificial Sequence: Synthetic oligonucleotide
atttctttcctgaagtgctgga

SEQ ID NO: 9644 - DNA, 22 bp, Artificial Sequence
  Description of Artificial Sequence: Synthetic oligonucleotide
tttgtacctgagtttcatagcg

SEQ ID NO: 9645 - DNA, 22 bp, Artificial Sequence
  Description of Artificial Sequence: Synthetic oligonucleotide
ttagtatctgccaaggagaggc

SEQ ID NO: 9646 - DNA, 22 bp, Artificial Sequence
  Description of Artificial Sequence: Synthetic oligonucleotide
gacgcttagcaatgaaactgcg

SEQ ID NO: 9647 - DNA, 22 bp, Artificial Sequence
  Description of Artificial Sequence: Synthetic oligonucleotide
atgatgaataaagctcagggct

SEQ ID NO: 9648 - DNA, 22 bp, Artificial Sequence
  Description of Artificial Sequence: Synthetic oligonucleotide
aagtattgtgatgtaatgaggc

SEQ ID NO: 9649 - DNA, 22 bp, Artificial Sequence
  Description of Artificial Sequence: Synthetic oligonucleotide
atttatccaggcagtctcgggc

SEQ ID NO: 9650 - DNA, 22 bp, Artificial Sequence
  Description of Artificial Sequence: Synthetic oligonucleotide
ttcactgtcaaaggatactggg

SEQ ID NO: 9651 - DNA, 22 bp, Artificial Sequence
  Description of Artificial Sequence: Synthetic oligonucleotide
atattatgtcactatttcgtct

SEQ ID NO: 9652 - DNA, 22 bp, Artificial Sequence
  Description of Artificial Sequence: Synthetic oligonucleotide
ttatagtagcgtatcgtaggag

SEQ ID NO: 9653 - DNA, 22 bp, Artificial Sequence
  Description of Artificial Sequence: Synthetic oligonucleotide
ctacctaaggccatgaacttga

SEQ ID NO: 9654 - DNA, 22 bp, Artificial Sequence
  Description of Artificial Sequence: Synthetic oligonucleotide
ttaagtaaagccagttcttcga

SEQ ID NO: 9655 - DNA, 22 bp, Artificial Sequence
  Description of Artificial Sequence: Synthetic oligonucleotide
tttcttgtggacgctgagagca

SEQ ID NO: 9656 - DNA, 22 bp, Artificial Sequence
  Description of Artificial Sequence: Synthetic oligonucleotide
gtattcaatgattgtctttccc

SEQ ID NO: 9657 - DNA, 22 bp, Artificial Sequence
  Description of Artificial Sequence: Synthetic oligonucleotide
tttccttggaagtcactccttc

SEQ ID NO: 9658 - DNA, 22 bp, Artificial Sequence
  Description of Artificial Sequence: Synthetic oligonucleotide
tactttgatagcatccatagtg

SEQ ID NO: 9659 - DNA, 22 bp, Artificial Sequence
  Description of Artificial Sequence: Synthetic oligonucleotide
tttctgcttgaattaatgaggc

SEQ ID NO: 9660 - DNA, 22 bp, Artificial Sequence
  Description of Artificial Sequence: Synthetic oligonucleotide
attaactttcccattatgagca

SEQ ID NO: 9661 - DNA, 22 bp, Artificial Sequence
  Description of Artificial Sequence: Synthetic oligonucleotide
tataaggatggaacccaagcca

SEQ ID NO: 9662 - DNA, 22 bp, Artificial Sequence
  Description of Artificial Sequence: Synthetic oligonucleotide
ttaaggcagcaaagtaatctct

SEQ ID NO: 9663 - DNA, 22 bp, Artificial Sequence
  Description of Artificial Sequence: Synthetic oligonucleotide
atataaatgactcttaaagctt

SEQ ID NO: 9664 - DNA, 22 bp, Artificial Sequence
  Description of Artificial Sequence: Synthetic oligonucleotide
ttaaagctttacactttgggac

SEQ ID NO: 9665 - DNA, 22 bp, Artificial Sequence
  Description of Artificial Sequence: Synthetic oligonucleotide
atatgttgtggtattgcttcac

SEQ ID NO: 9666 - DNA, 22 bp, Artificial Sequence
  Description of Artificial Sequence: Synthetic oligonucleotide
tttctcttccacatgaggacca

SEQ ID NO: 9667 - DNA, 22 bp, Artificial Sequence
  Description of Artificial Sequence: Synthetic oligonucleotide
atagtacttgttactaattgtc

SEQ ID NO: 9668 - DNA, 22 bp, Artificial Sequence
  Description of Artificial Sequence: Synthetic oligonucleotide
ataattaaagagcagttcccgt

SEQ ID NO: 9669 - DNA, 22 bp, Artificial Sequence
  Description of Artificial Sequence: Synthetic oligonucleotide
ttaatatgacttagaaactgct

SEQ ID NO: 9670 - DNA, 22 bp, Artificial Sequence
  Description of Artificial Sequence: Synthetic oligonucleotide
atagttgatcacttcaggagcc

SEQ ID NO: 9671 - DNA, 22 bp, Artificial Sequence
  Description of Artificial Sequence: Synthetic oligonucleotide
atctccaatacagacgcaggtt

SEQ ID NO: 9672 - DNA, 22 bp, Artificial Sequence
  Description of Artificial Sequence: Synthetic oligonucleotide
ttatgtccagatcttgaatcct

SEQ ID NO: 9673 - DNA, 22 bp, Artificial Sequence
  Description of Artificial Sequence: Synthetic oligonucleotide
ttctcttgactgctcataggca

SEQ ID NO: 9674 - DNA, 22 bp, Artificial Sequence
  Description of Artificial Sequence: Synthetic oligonucleotide
ttacctggagagaaataagccc

SEQ ID NO: 9675 - DNA, 22 bp, Artificial Sequence
  Description of Artificial Sequence: Synthetic oligonucleotide
tttaccaaacagtttcgagctg

SEQ ID NO: 9676 - DNA, 22 bp, Artificial Sequence
  Description of Artificial Sequence: Synthetic oligonucleotide
tttctgaaccagatcactgttg

SEQ ID NO: 9677 - DNA, 22 bp, Artificial Sequence
  Description of Artificial Sequence: Synthetic oligonucleotide
attcatcttcagacatggagcc

SEQ ID NO: 9678 - DNA, 22 bp, Artificial Sequence
  Description of Artificial Sequence: Synthetic oligonucleotide
tttccagtccactttcagaggc

SEQ ID NO: 9679 - DNA, 22 bp, Artificial Sequence
  Description of Artificial Sequence: Synthetic oligonucleotide
tttgttcagcagattccatggc

SEQ ID NO: 9680 - DNA, 22 bp, Artificial Sequence
  Description of Artificial Sequence: Synthetic oligonucleotide
ataaccctcaaggtaagctggg

SEQ ID NO: 9681 - DNA, 22 bp, Artificial Sequence
  Description of Artificial Sequence: Synthetic oligonucleotide
ttctttaagacagctaagaggg

SEQ ID NO: 9682 - DNA, 22 bp, Artificial Sequence
  Description of Artificial Sequence: Synthetic oligonucleotide
ttattaaatgactctttggcga

SEQ ID NO: 9683 - DNA, 22 bp, Artificial Sequence
  Description of Artificial Sequence: Synthetic oligonucleotide
gaatgaaagcacatagagtgcc

SEQ ID NO: 9684 - DNA, 22 bp, Artificial Sequence
  Description of Artificial Sequence: Synthetic oligonucleotide
atattctgagactttgcatggt

SEQ ID NO: 9685 - DNA, 22 bp, Artificial Sequence
  Description of Artificial Sequence: Synthetic oligonucleotide
taaagcaagcaatttctctggt

SEQ ID NO: 9686 - DNA, 22 bp, Artificial Sequence
  Description of Artificial Sequence: Synthetic oligonucleotide
attgtctttgagttccattcca

SEQ ID NO: 9687 - DNA, 22 bp, Artificial Sequence
  Description of Artificial Sequence: Synthetic oligonucleotide
ttatccaagtaagacatgagct

SEQ ID NO: 9688 - DNA, 22 bp, Artificial Sequence
  Description of Artificial Sequence: Synthetic oligonucleotide
ttaaatgactgtatagtcacca

SEQ ID NO: 9689 - DNA, 22 bp, Artificial Sequence
  Description of Artificial Sequence: Synthetic oligonucleotide
ttgtagtctcattaagacacgt

SEQ ID NO: 9690 - DNA, 22 bp, Artificial Sequence
  Description of Artificial Sequence: Synthetic oligonucleotide
tttatgttccctaaggagacct

SEQ ID NO: 9691 - DNA, 22 bp, Artificial Sequence
  Description of Artificial Sequence: Synthetic oligonucleotide
atttaaatccagccagaaagca

SEQ ID NO: 9692 - DNA, 22 bp, Artificial Sequence
  Description of Artificial Sequence: Synthetic oligonucleotide
gccacattgaacttgaggcgct

SEQ ID NO: 9693 - DNA, 22 bp, Artificial Sequence
  Description of Artificial Sequence: Synthetic oligonucleotide
cttccttaggactgtggcatcg

SEQ ID NO: 9694 - DNA, 22 bp, Artificial Sequence
  Description of Artificial Sequence: Synthetic oligonucleotide
taagtcttgatgatggagccgt

SEQ ID NO: 9695 - DNA, 22 bp, Artificial Sequence
  Description of Artificial Sequence: Synthetic oligonucleotide
taaattctgcactcaaatacat

SEQ ID NO: 9696 - DNA, 22 bp, Artificial Sequence
  Description of Artificial Sequence: Synthetic oligonucleotide
atttgtactaacatacactgat

SEQ ID NO: 9697 - DNA, 22 bp, Artificial Sequence
  Description of Artificial Sequence: Synthetic oligonucleotide
ttaccattgctatgtataagct

SEQ ID NO: 9698 - DNA, 22 bp, Artificial Sequence
  Description of Artificial Sequence: Synthetic oligonucleotide
taagttaagctctttaagacgc

SEQ ID NO: 9699 - DNA, 22 bp, Artificial Sequence
  Description of Artificial Sequence: Synthetic oligonucleotide
aatatccagtactttctctgct

SEQ ID NO: 9700 - DNA, 22 bp, Artificial Sequence
  Description of Artificial Sequence: Synthetic oligonucleotide
ttcaaattcacctgactgtgct

SEQ ID NO: 9701 - DNA, 22 bp, Artificial Sequence
  Description of Artificial Sequence: Synthetic oligonucleotide
ttcttctggaagtcgtccaggt

SEQ ID NO: 9702 - DNA, 22 bp, Artificial Sequence
  Description of Artificial Sequence: Synthetic oligonucleotide
agatgctttcaggatgagactg

SEQ ID NO: 9703 - DNA, 22 bp, Artificial Sequence
  Description of Artificial Sequence: Synthetic oligonucleotide
ctacctctacccagatagggca

SEQ ID NO: 9704 - DNA, 22 bp, Artificial Sequence
  Description of Artificial Sequence: Synthetic oligonucleotide
ttatgatacggtttaggagccc

SEQ ID NO: 9705 - DNA, 22 bp, Artificial Sequence
  Description of Artificial Sequence: Synthetic oligonucleotide
tttcatccaggcttcgagccgg

SEQ ID NO: 9706 - DNA, 22 bp, Artificial Sequence
  Description of Artificial Sequence: Synthetic oligonucleotide
tttccacagcattctttaaggc

SEQ ID NO: 9707 - DNA, 22 bp, Artificial Sequence
  Description of Artificial Sequence: Synthetic oligonucleotide
ttctagttgcagcgttactgca

SEQ ID NO: 9708 - DNA, 22 bp, Artificial Sequence
  Description of Artificial Sequence: Synthetic oligonucleotide
attcagcttgggcagagtccca

SEQ ID NO: 9709 - DNA, 22 bp, Artificial Sequence
  Description of Artificial Sequence: Synthetic oligonucleotide
taacaccatgatggacaggctt

SEQ ID NO: 9710 - DNA, 22 bp, Artificial Sequence
  Description of Artificial Sequence: Synthetic oligonucleotide
ataaatcctgacatggatagta

SEQ ID NO: 9711 - DNA, 22 bp, Artificial Sequence
  Description of Artificial Sequence: Synthetic oligonucleotide
caaggaatttatagtgacagcc

SEQ ID NO: 9712 - DNA, 22 bp, Artificial Sequence
  Description of Artificial Sequence: Synthetic oligonucleotide
tatacgtggcaatttcatcggg

SEQ ID NO: 9713 - DNA, 22 bp, Artificial Sequence
  Description of Artificial Sequence: Synthetic oligonucleotide
ttatagggcgctgaatcttggc

SEQ ID NO: 9714 - DNA, 22 bp, Artificial Sequence
  Description of Artificial Sequence: Synthetic oligonucleotide
ataccacaggtgaccttgcggt

SEQ ID NO: 9715 - DNA, 22 bp, Artificial Sequence
  Description of Artificial Sequence: Synthetic oligonucleotide
attatttatgaagctgtatggt

SEQ ID NO: 9716 - DNA, 22 bp, Artificial Sequence
  Description of Artificial Sequence: Synthetic oligonucleotide
tatagatatgaaatattcatgc

SEQ ID NO: 9717 - DNA, 22 bp, Artificial Sequence
  Description of Artificial Sequence: Synthetic oligonucleotide
tttcatttctaatacctgcctc

SEQ ID NO: 9718 - DNA, 22 bp, Artificial Sequence
  Description of Artificial Sequence: Synthetic oligonucleotide
atatgaacagagtatattctct

SEQ ID NO: 9719 - DNA, 22 bp, Artificial Sequence
  Description of Artificial Sequence: Synthetic oligonucleotide
ttaaactcttcactaacgtctt

SEQ ID NO: 9720 - DNA, 22 bp, Artificial Sequence
  Description of Artificial Sequence: Synthetic oligonucleotide
ataaccagagacaattggcggc

SEQ ID NO: 9721 - DNA, 22 bp, Artificial Sequence
  Description of Artificial Sequence: Synthetic oligonucleotide
taataaccagagacaattggcg

SEQ ID NO: 9722 - DNA, 22 bp, Artificial Sequence
  Description of Artificial Sequence: Synthetic oligonucleotide
taatgtaatggagtattgtgct

SEQ ID NO: 9723 - DNA, 22 bp, Artificial Sequence
  Description of Artificial Sequence: Synthetic oligonucleotide
catagtcctgatcccagcggcc

SEQ ID NO: 9724 - DNA, 22 bp, Artificial Sequence
  Description of Artificial Sequence: Synthetic oligonucleotide
attccttcagctcttccgtggc

SEQ ID NO: 9725 - DNA, 22 bp, Artificial Sequence
  Description of Artificial Sequence: Synthetic oligonucleotide
tagaggaagaagtggtagcggg

SEQ ID NO: 9726 - DNA, 22 bp, Artificial Sequence
  Description of Artificial Sequence: Synthetic oligonucleotide
ttaacagttgctgaagtttggt

SEQ ID NO: 9727 - DNA, 22 bp, Artificial Sequence
  Description of Artificial Sequence: Synthetic oligonucleotide
ttagtgaatgaagtatattctt

SEQ ID NO: 9728 - DNA, 22 bp, Artificial Sequence
  Description of Artificial Sequence: Synthetic oligonucleotide
ttattaagaggtatatgatctg

SEQ ID NO: 9729 - DNA, 22 bp, Artificial Sequence
  Description of Artificial Sequence: Synthetic oligonucleotide
tggaactaagataaggtggccc

SEQ ID NO: 9730 - DNA, 22 bp, Artificial Sequence
  Description of Artificial Sequence: Synthetic oligonucleotide
tagagtttcgacaataagacca

SEQ ID NO: 9731 - DNA, 22 bp, Artificial Sequence
  Description of Artificial Sequence: Synthetic oligonucleotide
taggacaaagatgaaatgtggc

SEQ ID NO: 9732 - DNA, 22 bp, Artificial Sequence
  Description of Artificial Sequence: Synthetic oligonucleotide
tttctgcatgactttggctggc

SEQ ID NO: 9733 - DNA, 22 bp, Artificial Sequence
  Description of Artificial Sequence: Synthetic oligonucleotide
tttgtcaaatctgtcatctcgt

SEQ ID NO: 9734 - DNA, 22 bp, Artificial Sequence
  Description of Artificial Sequence: Synthetic oligonucleotide
ttaaagagcatcattagggcct

SEQ ID NO: 9735 - DNA, 22 bp, Artificial Sequence
  Description of Artificial Sequence: Synthetic oligonucleotide
atttgttagagtaatcaaccca

SEQ ID NO: 9736 - DNA, 22 bp, Artificial Sequence
  Description of Artificial Sequence: Synthetic oligonucleotide
tatttgttcagcagtataccgc

SEQ ID NO: 9737 - DNA, 22 bp, Artificial Sequence
  Description of Artificial Sequence: Synthetic oligonucleotide
taaacaattcctaattggtgca

SEQ ID NO: 9738 - DNA, 22 bp, Artificial Sequence
  Description of Artificial Sequence: Synthetic oligonucleotide
tttacttccaccagtatatccc

SEQ ID NO: 9739 - DNA, 22 bp, Artificial Sequence
  Description of Artificial Sequence: Synthetic oligonucleotide
tttacaacgaatagaatgtcct

SEQ ID NO: 9740 - DNA, 22 bp, Artificial Sequence
  Description of Artificial Sequence: Synthetic oligonucleotide
ttcctttagtatttaaagtggc

SEQ ID NO: 9741 - DNA, 22 bp, Artificial Sequence
  Description of Artificial Sequence: Synthetic oligonucleotide
ttaaatggaaataatggctcct

SEQ ID NO: 9742 - DNA, 22 bp, Artificial Sequence
  Description of Artificial Sequence: Synthetic oligonucleotide
ataatgctccacacactgtcgg

SEQ ID NO: 9743 - DNA, 22 bp, Artificial Sequence
  Description of Artificial Sequence: Synthetic oligonucleotide
ataatctttcctctcaataggt

SEQ ID NO: 9744 - DNA, 22 bp, Artificial Sequence
  Description of Artificial Sequence: Synthetic oligonucleotide
attccatctcgcttccctcggc

SEQ ID NO: 9745 - DNA, 22 bp, Artificial Sequence
  Description of Artificial Sequence: Synthetic oligonucleotide
atttcaggaagggatacctgga

SEQ ID NO: 9746 - DNA, 22 bp, Artificial Sequence
  Description of Artificial Sequence: Synthetic oligonucleotide
atttggtaatacaaagagacta

SEQ ID NO: 9747 - DNA, 22 bp, Artificial Sequence
  Description of Artificial Sequence: Synthetic oligonucleotide
ttctatgttcccattcacagca

SEQ ID NO: 9748 - DNA, 22 bp, Artificial Sequence
  Description of Artificial Sequence: Synthetic oligonucleotide
atattcgatgactatacacgac

SEQ ID NO: 9749 - DNA, 22 bp, Artificial Sequence
  Description of Artificial Sequence: Synthetic oligonucleotide
taaatcaatggattgacagtct

SEQ ID NO: 9750 - DNA, 22 bp, Artificial Sequence
  Description of Artificial Sequence: Synthetic oligonucleotide
taaaggaaatacttggtgggct

SEQ ID NO: 9751 - DNA, 22 bp, Artificial Sequence
  Description of Artificial Sequence: Synthetic oligonucleotide
aacagctggcccacagagaggc

SEQ ID NO: 9752 - DNA, 22 bp, Artificial Sequence
  Description of Artificial Sequence: Synthetic oligonucleotide
ttctgggaaaccataaattggg

SEQ ID NO: 9753 - DNA, 22 bp, Artificial Sequence
  Description of Artificial Sequence: Synthetic oligonucleotide
ataaacagtgatcctttcagct

SEQ ID NO: 9754 - DNA, 22 bp, Artificial Sequence
  Description of Artificial Sequence: Synthetic oligonucleotide
atttgtgacttgacacagcggc

SEQ ID NO: 9755 - DNA, 22 bp, Artificial Sequence
  Description of Artificial Sequence: Synthetic oligonucleotide
aataatctggatgatgtcacca

SEQ ID NO: 9756 - DNA, 22 bp, Artificial Sequence
  Description of Artificial Sequence: Synthetic oligonucleotide
tttccacaaatgaggtgctccc

SEQ ID NO: 9757 - DNA, 22 bp, Artificial Sequence
  Description of Artificial Sequence: Synthetic oligonucleotide
tatttgtcggcggcagagagcc

SEQ ID NO: 9758 - DNA, 22 bp, Artificial Sequence
  Description of Artificial Sequence: Synthetic oligonucleotide
tttgtatttgtatttgtcggcg

SEQ ID NO: 9759 - DNA, 22 bp, Artificial Sequence
  Description of Artificial Sequence: Synthetic oligonucleotide
taaatccttgagtccaactggt

SEQ ID NO: 9760 - DNA, 22 bp, Artificial Sequence
  Description of Artificial Sequence: Synthetic oligonucleotide
aactggcttgttgtcctctggc

SEQ ID NO: 9761 - DNA, 22 bp, Artificial Sequence
  Description of Artificial Sequence: Synthetic oligonucleotide
atctccaaagacagtaactggc

SEQ ID NO: 9762 - DNA, 22 bp, Artificial Sequence
  Description of Artificial Sequence: Synthetic oligonucleotide
atttgaacatcctccattagct

SEQ ID NO: 9763 - DNA, 22 bp, Artificial Sequence
  Description of Artificial Sequence: Synthetic oligonucleotide
atatgttgtgttaaatggtcca

SEQ ID NO: 9764 - DNA, 22 bp, Artificial Sequence
  Description of Artificial Sequence: Synthetic oligonucleotide
atctgatcacaccaagagaggt

SEQ ID NO: 9765 - DNA, 22 bp, Artificial Sequence
  Description of Artificial Sequence: Synthetic oligonucleotide
aagtggaaataagacaagtggt

SEQ ID NO: 9766 - DNA, 22 bp, Artificial Sequence
  Description of Artificial Sequence: Synthetic oligonucleotide
tttccttctaaataactgtcca

SEQ ID NO: 9767 - DNA, 22 bp, Artificial Sequence
  Description of Artificial Sequence: Synthetic oligonucleotide
atgtaatacggcgtgattgcca

SEQ ID NO: 9768 - DNA, 22 bp, Artificial Sequence
  Description of Artificial Sequence: Synthetic oligonucleotide
aagaccaatgaagtgacgggca

SEQ ID NO: 9769 - DNA, 22 bp, Artificial Sequence
  Description of Artificial Sequence: Synthetic oligonucleotide
aaccatcagcagctcgatggcc

SEQ ID NO: 9770 - DNA, 22 bp, Artificial Sequence
  Description of Artificial Sequence: Synthetic oligonucleotide
ttccgagtccagcttctgtggc

SEQ ID NO: 9771 - DNA, 22 bp, Artificial Sequence
  Description of Artificial Sequence: Synthetic oligonucleotide
ttgactgccacgagggcttggc

SEQ ID NO: 9772 - DNA, 22 bp, Artificial Sequence
  Description of Artificial Sequence: Synthetic oligonucleotide
tttaagtagagtgccaaatcct

SEQ ID NO: 9773 - DNA, 22 bp, Artificial Sequence
  Description of Artificial Sequence: Synthetic oligonucleotide
tttcccttgaggaagggcagga

SEQ ID NO: 9774 - DNA, 22 bp, Artificial Sequence
  Description of Artificial Sequence: Synthetic oligonucleotide
tttctggatcagtagtatagca

SEQ ID NO: 9775 - DNA, 22 bp, Artificial Sequence
  Description of Artificial Sequence: Synthetic oligonucleotide
taatgtttggataaatataggt

SEQ ID NO: 9776 - DNA, 22 bp, Artificial Sequence
  Description of Artificial Sequence: Synthetic oligonucleotide
ataataatacacatagcgcctc

SEQ ID NO: 9777 - DNA, 22 bp, Artificial Sequence
  Description of Artificial Sequence: Synthetic oligonucleotide
atatatcttcacctttagctgg

SEQ ID NO: 9778 - DNA, 22 bp, Artificial Sequence
  Description of Artificial Sequence: Synthetic oligonucleotide
tatacacatcagtctgtctcca

SEQ ID NO: 9779 - DNA, 22 bp, Artificial Sequence
  Description of Artificial Sequence: Synthetic oligonucleotide
tattcttagcactctgtttgca

SEQ ID NO: 9780 - DNA, 22 bp, Artificial Sequence
  Description of Artificial Sequence: Synthetic oligonucleotide
taatgtattgtcactattaggt

SEQ ID NO: 9781 - DNA, 22 bp, Artificial Sequence
  Description of Artificial Sequence: Synthetic oligonucleotide
atgtggtgtggtagtctgtggc

SEQ ID NO: 9782 - DNA, 22 bp, Artificial Sequence
  Description of Artificial Sequence: Synthetic oligonucleotide
atagaccttgtgggtacccggg

SEQ ID NO: 9783 - DNA, 22 bp, Artificial Sequence
  Description of Artificial Sequence: Synthetic oligonucleotide
atttatcgtgagtaaggcagga

SEQ ID NO: 9784 - DNA, 22 bp, Artificial Sequence
  Description of Artificial Sequence: Synthetic oligonucleotide
taacattcctggtgactcaggg

SEQ ID NO: 9785 - DNA, 22 bp, Artificial Sequence
  Description of Artificial Sequence: Synthetic oligonucleotide
taaatatctccaaatcagtggt

SEQ ID NO: 9786 - DNA, 22 bp, Artificial Sequence
  Description of Artificial Sequence: Synthetic oligonucleotide
atcaaattccataacaggtcct

SEQ ID NO: 9787 - DNA, 22 bp, Artificial Sequence
  Description of Artificial Sequence: Synthetic oligonucleotide
ataatcaaattccataacaggt

SEQ ID NO: 9788 - DNA, 22 bp, Artificial Sequence
  Description of Artificial Sequence: Synthetic oligonucleotide
attctttcccacattcttcgca

SEQ ID NO: 9789 - DNA, 22 bp, Artificial Sequence
  Description of Artificial Sequence: Synthetic oligonucleotide
taagtagagtttcatatcaccc

SEQ ID NO: 9790 - DNA, 22 bp, Artificial Sequence
  Description of Artificial Sequence: Synthetic oligonucleotide
tttcatatgtcagttcatggcc

SEQ ID NO: 9791 - DNA, 22 bp, Artificial Sequence
  Description of Artificial Sequence: Synthetic oligonucleotide
tttgcttcaatttgtcatagcg

SEQ ID NO: 9792 - DNA, 22 bp, Artificial Sequence
  Description of Artificial Sequence: Synthetic oligonucleotide
ttccaggactgaggaaggaggt

SEQ ID NO: 9793 - DNA, 22 bp, Artificial Sequence
  Description of Artificial Sequence: Synthetic oligonucleotide
taagcacttgatccgttctcca

SEQ ID NO: 9794 - DNA, 22 bp, Artificial Sequence
  Description of Artificial Sequence: Synthetic oligonucleotide
atatgtcatgaaatacattcca

SEQ ID NO: 9795 - DNA, 22 bp, Artificial Sequence
  Description of Artificial Sequence: Synthetic oligonucleotide
tttgtacaaggatgtgactcct

SEQ ID NO: 9796 - DNA, 22 bp, Artificial Sequence
  Description of Artificial Sequence: Synthetic oligonucleotide
tattgtcaggagatttactggc

SEQ ID NO: 9797 - DNA, 22 bp, Artificial Sequence
  Description of Artificial Sequence: Synthetic oligonucleotide
ttatgccttctgggtagcagct

SEQ ID NO: 9798 - DNA, 22 bp, Artificial Sequence
  Description of Artificial Sequence: Synthetic oligonucleotide
tttgtctacatcacacaaggcg

SEQ ID NO: 9799 - DNA, 22 bp, Artificial Sequence
  Description of Artificial Sequence: Synthetic oligonucleotide
tttctccataataaggcaaccc

SEQ ID NO: 9800 - DNA, 22 bp, Artificial Sequence
  Description of Artificial Sequence: Synthetic oligonucleotide
tttattgatcaggtctagagct

SEQ ID NO: 9801 - DNA, 22 bp, Artificial Sequence
  Description of Artificial Sequence: Synthetic oligonucleotide
ttatgagaatgtctttgggccc

SEQ ID NO: 9802 - DNA, 22 bp, Artificial Sequence
  Description of Artificial Sequence: Synthetic oligonucleotide
ttaagtgcccaggtggtgggcc

SEQ ID NO: 9803 - DNA, 22 bp, Artificial Sequence
  Description of Artificial Sequence: Synthetic oligonucleotide
ttgtctgcaatggaagggacgg

SEQ ID NO: 9804 - DNA, 22 bp, Artificial Sequence
  Description of Artificial Sequence: Synthetic oligonucleotide
tatttgctgtagtcacgaggct

SEQ ID NO: 9805 - DNA, 22 bp, Artificial Sequence
  Description of Artificial Sequence: Synthetic oligonucleotide
taattgtcttgattactctggt

SEQ ID NO: 9806 - DNA, 22 bp, Artificial Sequence
  Description of Artificial Sequence: Synthetic oligonucleotide
atagatgaaagaactctaccgt

SEQ ID NO: 9807 - DNA, 22 bp, Artificial Sequence
  Description of Artificial Sequence: Synthetic oligonucleotide
ttcttgtactgagtcaggtggg

SEQ ID NO: 9808 - DNA, 22 bp, Artificial Sequence
  Description of Artificial Sequence: Synthetic oligonucleotide
ttcctggaggagggagaggcct

SEQ ID NO: 9809 - DNA, 22 bp, Artificial Sequence
  Description of Artificial Sequence: Synthetic oligonucleotide
atacagatacaggtgaactggc

SEQ ID NO: 9810 - DNA, 22 bp, Artificial Sequence
  Description of Artificial Sequence: Synthetic oligonucleotide
aatagtaactgtttccttgcct

SEQ ID NO: 9811 - DNA, 22 bp, Artificial Sequence
  Description of Artificial Sequence: Synthetic oligonucleotide
tttcaatttgcgatctgctgca

SEQ ID NO: 9812 - DNA, 22 bp, Artificial Sequence
  Description of Artificial Sequence: Synthetic oligonucleotide
atatccatatttcaatttgcga

SEQ ID NO: 9813 - DNA, 22 bp, Artificial Sequence
  Description of Artificial Sequence: Synthetic oligonucleotide
atttcacatacgactatctgga

SEQ ID NO: 9814 - DNA, 22 bp, Artificial Sequence
  Description of Artificial Sequence: Synthetic oligonucleotide
aatatcaaagatcacatatgct

SEQ ID NO: 9815 - DNA, 22 bp, Artificial Sequence
  Description of Artificial Sequence: Synthetic oligonucleotide
atattctgtgcaattaaagcca

SEQ ID NO: 9816 - DNA, 22 bp, Artificial Sequence
  Description of Artificial Sequence: Synthetic oligonucleotide
aatagcaatagggttaactgcc

SEQ ID NO: 9817 - DNA, 22 bp, Artificial Sequence
  Description of Artificial Sequence: Synthetic oligonucleotide
atttccttcaaatttatcaggc

SEQ ID NO: 9818 - DNA, 22 bp, Artificial Sequence
  Description of Artificial Sequence: Synthetic oligonucleotide
tattactattaagccacttccc

SEQ ID NO: 9819 - DNA, 22 bp, Artificial Sequence
  Description of Artificial Sequence: Synthetic oligonucleotide
taattcactgctcttcatggcc

SEQ ID NO: 9820 - DNA, 22 bp, Artificial Sequence
  Description of Artificial Sequence: Synthetic oligonucleotide
tattgccaaatttgggcggcct

SEQ ID NO: 9821 - DNA, 22 bp, Artificial Sequence
  Description of Artificial Sequence: Synthetic oligonucleotide
atttattgccaaatttgggcgg

SEQ ID NO: 9822 - DNA, 22 bp, Artificial Sequence
  Description of Artificial Sequence: Synthetic oligonucleotide
tttaggcaggagatttagacct

SEQ ID NO: 9823 - DNA, 22 bp, Artificial Sequence
  Description of Artificial Sequence: Synthetic oligonucleotide
aatagaagaaatagaatagcca

SEQ ID NO: 9824 - DNA, 22 bp, Artificial Sequence
  Description of Artificial Sequence: Synthetic oligonucleotide
atatctgggcaaatgatggcct

SEQ ID NO: 9825 - DNA, 22 bp, Artificial Sequence
  Description of Artificial Sequence: Synthetic oligonucleotide
tttacgtttgcatgaaggtggt

SEQ ID NO: 9826 - DNA, 22 bp, Artificial Sequence
  Description of Artificial Sequence: Synthetic oligonucleotide
ttaatagaagcaatatggagca

SEQ ID NO: 9827 - DNA, 22 bp, Artificial Sequence
  Description of Artificial Sequence: Synthetic oligonucleotide
tttaacatttggatcacttcca

SEQ ID NO: 9828 - DNA, 22 bp, Artificial Sequence
  Description of Artificial Sequence: Synthetic oligonucleotide
attactgcaagctcactgagca

SEQ ID NO: 9829 - DNA, 22 bp, Artificial Sequence
  Description of Artificial Sequence: Synthetic oligonucleotide
tttagccttaagaattactgca

SEQ ID NO: 9830 - DNA, 22 bp, Artificial Sequence
  Description of Artificial Sequence: Synthetic oligonucleotide
tttgtacagagcatttccagca

SEQ ID NO: 9831 - DNA, 22 bp, Artificial Sequence
  Description of Artificial Sequence: Synthetic oligonucleotide
atctttgtacagagcatttcca

SEQ ID NO: 9832 - DNA, 22 bp, Artificial Sequence
  Description of Artificial Sequence: Synthetic oligonucleotide
taaattcatcgaacactttggc

SEQ ID NO: 9833 - DNA, 22 bp, Artificial Sequence
  Description of Artificial Sequence: Synthetic oligonucleotide
taaatgtagatgttataagcct

SEQ ID NO: 9834 - DNA, 22 bp, Artificial Sequence
  Description of Artificial Sequence: Synthetic oligonucleotide
atatttcagtgtctcttgcgct

SEQ ID NO: 9835 - DNA, 22 bp, Artificial Sequence
  Description of Artificial Sequence: Synthetic oligonucleotide
tttctccttgacaatgactgcc

SEQ ID NO: 9836 - DNA, 22 bp, Artificial Sequence
  Description of Artificial Sequence: Synthetic oligonucleotide
tttagataaggcttcatctcct

SEQ ID NO: 9837 - DNA, 22 bp, Artificial Sequence
  Description of Artificial Sequence: Synthetic oligonucleotide
tataattactcgattagcagct

SEQ ID NO: 9838 - DNA, 22 bp, Artificial Sequence
  Description of Artificial Sequence: Synthetic oligonucleotide
taaactctgaatatactctgga

SEQ ID NO: 9839 - DNA, 22 bp, Artificial Sequence
  Description of Artificial Sequence: Synthetic oligonucleotide
attaagaacttcttgatgtcct

SEQ ID NO: 9840 - DNA, 22 bp, Artificial Sequence
  Description of Artificial Sequence: Synthetic oligonucleotide
tttcttcatggaataccaccgg

SEQ ID NO: 9841 - DNA, 22 bp, Artificial Sequence
  Description of Artificial Sequence: Synthetic oligonucleotide
atagactctgagaaacagaggg

SEQ ID NO: 9842 - DNA, 22 bp, Artificial Sequence
  Description of Artificial Sequence: Synthetic oligonucleotide
ttggatttctgttgtgtttcct

SEQ ID NO: 9843 - DNA, 22 bp, Artificial Sequence
  Description of Artificial Sequence: Synthetic oligonucleotide
tttactaagaacgatgtcagct

SEQ ID NO: 9844 - DNA, 22 bp, Artificial Sequence
  Description of Artificial Sequence: Synthetic oligonucleotide
ttagccattccttctatttcca

SEQ ID NO: 9845 - DNA, 22 bp, Artificial Sequence
  Description of Artificial Sequence: Synthetic oligonucleotide
ataacttatcactttgcgaggt

SEQ ID NO: 9846 - DNA, 22 bp, Artificial Sequence
  Description of Artificial Sequence: Synthetic oligonucleotide
tttctactaactcctttaccgc

SEQ ID NO: 9847 - DNA, 22 bp, Artificial Sequence
  Description of Artificial Sequence: Synthetic oligonucleotide
atacagtatgcatgtaagacct

SEQ ID NO: 9848 - DNA, 22 bp, Artificial Sequence
  Description of Artificial Sequence: Synthetic oligonucleotide
attaactagaatctgtacagct

SEQ ID NO: 9849 - DNA, 22 bp, Artificial Sequence
  Description of Artificial Sequence: Synthetic oligonucleotide
atacaagagatgaaatcctcca

SEQ ID NO: 9850 - DNA, 22 bp, Artificial Sequence
  Description of Artificial Sequence: Synthetic oligonucleotide
ttacaactagacatttagtcct

SEQ ID NO: 9851 - DNA, 22 bp, Artificial Sequence
  Description of Artificial Sequence: Synthetic oligonucleotide
ttggtgtcatagaccaggcgga

SEQ ID NO: 9852 - DNA, 22 bp, Artificial Sequence
  Description of Artificial Sequence: Synthetic oligonucleotide
attgctgaggtggacagccgga

SEQ ID NO: 9853 - DNA, 22 bp, Artificial Sequence
  Description of Artificial Sequence: Synthetic oligonucleotide
ttcgaacctcaaaggaggagga

SEQ ID NO: 9854 - DNA, 22 bp, Artificial Sequence
  Description of Artificial Sequence: Synthetic oligonucleotide
ataaatgacaagtgtgttgcca

SEQ ID NO: 9855 - DNA, 22 bp, Artificial Sequence
  Description of Artificial Sequence: Synthetic oligonucleotide
atcatgatgggcaagatgacca

SEQ ID NO: 9856 - DNA, 22 bp, Artificial Sequence
  Description of Artificial Sequence: Synthetic oligonucleotide
atatgtagaagggaagccagca

SEQ ID NO: 9857 - DNA, 22 bp, Artificial Sequence
  Description of Artificial Sequence: Synthetic oligonucleotide
ttggcatagctgaggataaggg

SEQ ID NO: 9858 - DNA, 22 bp, Artificial Sequence
  Description of Artificial Sequence: Synthetic oligonucleotide
tttgctcttgagagcagtggca

SEQ ID NO: 9859 - DNA, 22 bp, Artificial Sequence
  Description of Artificial Sequence: Synthetic oligonucleotide
ttcacgtactccagtggcgggc

SEQ ID NO: 9860 - DNA, 22 bp, Artificial Sequence
  Description of Artificial Sequence: Synthetic oligonucleotide
tttctcaagaggtttacgtggc

SEQ ID NO: 9861 - DNA, 22 bp, Artificial Sequence
  Description of Artificial Sequence: Synthetic oligonucleotide
tttcctttcggcatttggagca

SEQ ID NO: 9862 - DNA, 22 bp, Artificial Sequence
  Description of Artificial Sequence: Synthetic oligonucleotide
ttctcttagaaagaaacctgca

SEQ ID NO: 9863 - DNA, 22 bp, Artificial Sequence
  Description of Artificial Sequence: Synthetic oligonucleotide
attctctgagccggcatgtgct

SEQ ID NO: 9864 - DNA, 22 bp, Artificial Sequence
  Description of Artificial Sequence: Synthetic oligonucleotide
tttatcaacaatttatcaccct

SEQ ID NO: 9865 - DNA, 22 bp, Artificial Sequence
  Description of Artificial Sequence: Synthetic oligonucleotide
ttaaacttagacaaatcaggct

SEQ ID NO: 9866 - DNA, 22 bp, Artificial Sequence
  Description of Artificial Sequence: Synthetic oligonucleotide
atacatgtccacataactacga

SEQ ID NO: 9867 - DNA, 22 bp, Artificial Sequence
  Description of Artificial Sequence: Synthetic oligonucleotide
ttatcttcccataacgaagcgt

SEQ ID NO: 9868 - DNA, 22 bp, Artificial Sequence
  Description of Artificial Sequence: Synthetic oligonucleotide
ataacaatcgagccaaagagct

SEQ ID NO: 9869 - DNA, 22 bp, Artificial Sequence
  Description of Artificial Sequence: Synthetic oligonucleotide
atactgtagaaggaaagttcct

SEQ ID NO: 9870 - DNA, 22 bp, Artificial Sequence
  Description of Artificial Sequence: Synthetic oligonucleotide
tttccctagcatcatagttggg

SEQ ID NO: 9871 - DNA, 22 bp, Artificial Sequence
  Description of Artificial Sequence: Synthetic oligonucleotide
tttgctctagattctggcagcc

SEQ ID NO: 9872 - DNA, 22 bp, Artificial Sequence
  Description of Artificial Sequence: Synthetic oligonucleotide
ttaatgtcacgcacgatttccc

SEQ ID NO: 9873 - DNA, 22 bp, Artificial Sequence
  Description of Artificial Sequence: Synthetic oligonucleotide
tttcctttagtgggcagctggg

SEQ ID NO: 9874 - DNA, 22 bp, Artificial Sequence
  Description of Artificial Sequence: Synthetic oligonucleotide
taatgtgtaattaaccacagct

SEQ ID NO: 9875 - DNA, 22 bp, Artificial Sequence
  Description of Artificial Sequence: Synthetic oligonucleotide
tatctctatgtgcaaatgtgca

SEQ ID NO: 9876 - DNA, 22 bp, Artificial Sequence
  Description of Artificial Sequence: Synthetic oligonucleotide
ttaaatctcgatgggcaatggc

SEQ ID NO: 9877 - DNA, 22 bp, Artificial Sequence
  Description of Artificial Sequence: Synthetic oligonucleotide
aatgagtgaagcgctcgttgca

SEQ ID NO: 9878 - DNA, 22 bp, Artificial Sequence
  Description of Artificial Sequence: Synthetic oligonucleotide
atctctctggaagttgatggct

SEQ ID NO: 9879 - DNA, 22 bp, Artificial Sequence
  Description of Artificial Sequence: Synthetic oligonucleotide
tttatctatcccaatgcatcca

SEQ ID NO: 9880 - DNA, 22 bp, Artificial Sequence
  Description of Artificial Sequence: Synthetic oligonucleotide
ttcaatttggagagcttctgct

SEQ ID NO: 9881 - DNA, 22 bp, Artificial Sequence
  Description of Artificial Sequence: Synthetic oligonucleotide
ttacgcttcaactaaagttcct

SEQ ID NO: 9882 - DNA, 22 bp, Artificial Sequence
  Description of Artificial Sequence: Synthetic oligonucleotide
atttatgattccatcaaaggct

SEQ ID NO: 9883 - DNA, 22 bp, Artificial Sequence
  Description of Artificial Sequence: Synthetic oligonucleotide
atactttataacagtcagtggc

SEQ ID NO: 9884 - DNA, 22 bp, Artificial Sequence
  Description of Artificial Sequence: Synthetic oligonucleotide
aactcaattgcattgttgtcca

SEQ ID NO: 9885 - DNA, 22 bp, Artificial Sequence
  Description of Artificial Sequence: Synthetic oligonucleotide
tacaaggtacacttactgggcc

SEQ ID NO: 9886 - DNA, 22 bp, Artificial Sequence
  Description of Artificial Sequence: Synthetic oligonucleotide
atttcagttcaaacgtgttggc

SEQ ID NO: 9887 - DNA, 22 bp, Artificial Sequence
  Description of Artificial Sequence: Synthetic oligonucleotide
ttagactctgaacgaatctgca

SEQ ID NO: 9888 - DNA, 22 bp, Artificial Sequence
  Description of Artificial Sequence: Synthetic oligonucleotide
attaactagaacactagagggc

SEQ ID NO: 9889 - DNA, 22 bp, Artificial Sequence
  Description of Artificial Sequence: Synthetic oligonucleotide
taattctctccagttgctagga

SEQ ID NO: 9890 - DNA, 22 bp, Artificial Sequence
  Description of Artificial Sequence: Synthetic oligonucleotide
ttaagagggtttggagaaaggc

SEQ ID NO: 9891 - DNA, 22 bp, Artificial Sequence
  Description of Artificial Sequence: Synthetic oligonucleotide
tatggtaggtaagaaatctggc

SEQ ID NO: 9892 - DNA, 22 bp, Artificial Sequence
  Description of Artificial Sequence: Synthetic oligonucleotide
tttggttcccagttactgagct

SEQ ID NO: 9893 - DNA, 22 bp, Artificial Sequence
  Description of Artificial Sequence: Synthetic oligonucleotide
ataaagaaaccctgctcgtgcc

SEQ ID NO: 9894 - DNA, 22 bp, Artificial Sequence
  Description of Artificial Sequence: Synthetic oligonucleotide
ttaggtgagcatagtctggcca

SEQ ID NO: 9895 - DNA, 22 bp, Artificial Sequence
  Description of Artificial Sequence: Synthetic oligonucleotide
attcctatcagaactcacagca

SEQ ID NO: 9896 - DNA, 22 bp, Artificial Sequence
  Description of Artificial Sequence: Synthetic oligonucleotide
tttacaagtgactagatgtcca

SEQ ID NO: 9897 - DNA, 22 bp, Artificial Sequence
  Description of Artificial Sequence: Synthetic oligonucleotide
aataagaacaacataacatgcc

SEQ ID NO: 9898 - DNA, 22 bp, Artificial Sequence
  Description of Artificial Sequence: Synthetic oligonucleotide
ttaaacagtagaggagccaggg

SEQ ID NO: 9899 - DNA, 22 bp, Artificial Sequence
  Description of Artificial Sequence: Synthetic oligonucleotide
ttgttaaacagtagaggagcca

SEQ ID NO: 9900 - DNA, 22 bp, Artificial Sequence
  Description of Artificial Sequence: Synthetic oligonucleotide
tttcctcagcaatatacatgcc

SEQ ID NO: 9901 - DNA, 22 bp, Artificial Sequence
  Description of Artificial Sequence: Synthetic oligonucleotide
atacatttacagtagtattggt

SEQ ID NO: 9902 - DNA, 22 bp, Artificial Sequence
  Description of Artificial Sequence: Synthetic oligonucleotide
ttagcaaatcagacttaagccg

SEQ ID NO: 9903 - DNA, 22 bp, Artificial Sequence
  Description of Artificial Sequence: Synthetic oligonucleotide
taatgttagaagattagcggca

SEQ ID NO: 9904 - DNA, 22 bp, Artificial Sequence
  Description of Artificial Sequence: Synthetic oligonucleotide
taagtgtaagagtgcaaatggt

SEQ ID NO: 9905 - DNA, 22 bp, Artificial Sequence
  Description of Artificial Sequence: Synthetic oligonucleotide
ataatgaatgatctggtctggt

SEQ ID NO: 9906 - DNA, 22 bp, Artificial Sequence
  Description of Artificial Sequence: Synthetic oligonucleotide
attatgagtcaggcgaaatggc

SEQ ID NO: 9907 - DNA, 22 bp, Artificial Sequence
  Description of Artificial Sequence: Synthetic oligonucleotide
taatcctgatacctaaccacgg

SEQ ID NO: 9908 - DNA, 22 bp, Artificial Sequence
  Description of Artificial Sequence: Synthetic oligonucleotide
tttccaaattgcttgaacagcc

SEQ ID NO: 9909 - DNA, 22 bp, Artificial Sequence
  Description of Artificial Sequence: Synthetic oligonucleotide
tatccgttgtgcattgaatggc

SEQ ID NO: 9910 - DNA, 22 bp, Artificial Sequence
  Description of Artificial Sequence: Synthetic oligonucleotide
ataacaaaccaagtcctaagcc

SEQ ID NO: 9911 - DNA, 22 bp, Artificial Sequence
  Description of Artificial Sequence: Synthetic oligonucleotide
aagtttgttgataaagagaggg

SEQ ID NO: 9912 - DNA, 22 bp, Artificial Sequence
  Description of Artificial Sequence: Synthetic oligonucleotide
aatactgttgagtgacttccgg

SEQ ID NO: 9913 - DNA, 22 bp, Artificial Sequence
  Description of Artificial Sequence: Synthetic oligonucleotide
aatgattcagactttcactgga

SEQ ID NO: 9914 - DNA, 22 bp, Artificial Sequence
  Description of Artificial Sequence: Synthetic oligonucleotide
ttatattcacacggcggtgccc

SEQ ID NO: 9915 - DNA, 22 bp, Artificial Sequence
  Description of Artificial Sequence: Synthetic oligonucleotide
atacattagcatgtaagctcca

SEQ ID NO: 9916 - DNA, 22 bp, Artificial Sequence
  Description of Artificial Sequence: Synthetic oligonucleotide
tttgcaaagttcagtgctcggt

SEQ ID NO: 9917 - DNA, 22 bp, Artificial Sequence
  Description of Artificial Sequence: Synthetic oligonucleotide
attggtcaagtgacagtgtcgg

SEQ ID NO: 9918 - DNA, 22 bp, Artificial Sequence
  Description of Artificial Sequence: Synthetic oligonucleotide
tataatgcacacaggacatggt

SEQ ID NO: 9919 - DNA, 22 bp, Artificial Sequence
  Description of Artificial Sequence: Synthetic oligonucleotide
atattcttctttcgtctgcgca

SEQ ID NO: 9920 - DNA, 22 bp, Artificial Sequence
  Description of Artificial Sequence: Synthetic oligonucleotide
ttgaatttgtattaaaggaggt

SEQ ID NO: 9921 - DNA, 22 bp, Artificial Sequence
  Description of Artificial Sequence: Synthetic oligonucleotide
tttaagttacagattcatccct

SEQ ID NO: 9922 - DNA, 22 bp, Artificial Sequence
  Description of Artificial Sequence: Synthetic oligonucleotide
taacctttgaagaagcattcca

SEQ ID NO: 9923 - DNA, 22 bp, Artificial Sequence
  Description of Artificial Sequence: Synthetic oligonucleotide
tactagaagaaatctgaggcca

SEQ ID NO: 9924 - DNA, 22 bp, Artificial Sequence
  Description of Artificial Sequence: Synthetic oligonucleotide
tatacacgacaacataactgca

SEQ ID NO: 9925 - DNA, 22 bp, Artificial Sequence
  Description of Artificial Sequence: Synthetic oligonucleotide
aatgttacttctaagcaggcct

SEQ ID NO: 9926 - DNA, 22 bp, Artificial Sequence
  Description of Artificial Sequence: Synthetic oligonucleotide
aactgttattctttgtttggca

SEQ ID NO: 9927 - DNA, 22 bp, Artificial Sequence
  Description of Artificial Sequence: Synthetic oligonucleotide
tatacttgcatattaacatggg

SEQ ID NO: 9928 - DNA, 22 bp, Artificial Sequence
  Description of Artificial Sequence: Synthetic oligonucleotide
tttacttatgataagtgcaggc

SEQ ID NO: 9929 - DNA, 22 bp, Artificial Sequence
  Description of Artificial Sequence: Synthetic oligonucleotide
ttagctgataggttcagtggct

SEQ ID NO: 9930 - DNA, 22 bp, Artificial Sequence
  Description of Artificial Sequence: Synthetic oligonucleotide
tttagctgataggttcagtggc

SEQ ID NO: 9931 - DNA, 22 bp, Artificial Sequence
  Description of Artificial Sequence: Synthetic oligonucleotide
atttgccatcagaggtcttggg

SEQ ID NO: 9932 - DNA, 22 bp, Artificial Sequence
  Description of Artificial Sequence: Synthetic oligonucleotide
ttgctgctggagcctggatggg

SEQ ID NO: 9933 - DNA, 22 bp, Artificial Sequence
  Description of Artificial Sequence: Synthetic oligonucleotide
tattcaaataccactgggaggc

SEQ ID NO: 9934 - DNA, 22 bp, Artificial Sequence
  Description of Artificial Sequence: Synthetic oligonucleotide
atcacacggacttgaatctggc

SEQ ID NO: 9935 - DNA, 22 bp, Artificial Sequence
  Description of Artificial Sequence: Synthetic oligonucleotide
ttacagtttaattctactggct

SEQ ID NO: 9936 - DNA, 22 bp, Artificial Sequence
  Description of Artificial Sequence: Synthetic oligonucleotide
ttaccaaacctttggcatcggt

SEQ ID NO: 9937 - DNA, 22 bp, Artificial Sequence
  Description of Artificial Sequence: Synthetic oligonucleotide
tttcctcttcctcttcgctgct

SEQ ID NO: 9938 - DNA, 22 bp, Artificial Sequence
  Description of Artificial Sequence: Synthetic oligonucleotide
tttagcaatcaattctttcgct

SEQ ID NO: 9939 - DNA, 22 bp, Artificial Sequence
  Description of Artificial Sequence: Synthetic oligonucleotide
ttagtgatcccatagttcacgc

SEQ ID NO: 9940 - DNA, 22 bp, Artificial Sequence
  Description of Artificial Sequence: Synthetic oligonucleotide
atatccttggtgtcctgcagca

SEQ ID NO: 9941 - DNA, 22 bp, Artificial Sequence
  Description of Artificial Sequence: Synthetic oligonucleotide
ttctggtacaccaaagtgggtg

SEQ ID NO: 9942 - DNA, 22 bp, Artificial Sequence
  Description of Artificial Sequence: Synthetic oligonucleotide
atcattggaggcggaggtggcg

SEQ ID NO: 9943 - DNA, 22 bp, Artificial Sequence
  Description of Artificial Sequence: Synthetic oligonucleotide
ttgttcttgaactgtagtacct

SEQ ID NO: 9944 - DNA, 22 bp, Artificial Sequence
  Description of Artificial Sequence: Synthetic oligonucleotide
tattcatcacaattaacagcct

SEQ ID NO: 9945 - DNA, 22 bp, Artificial Sequence
  Description of Artificial Sequence: Synthetic oligonucleotide
ttctgagtccttagcctgggcc

SEQ ID NO: 9946 - DNA, 22 bp, Artificial Sequence
  Description of Artificial Sequence: Synthetic oligonucleotide
atgagtttgcggtagaggtggg

SEQ ID NO: 9947 - DNA, 22 bp, Artificial Sequence
  Description of Artificial Sequence: Synthetic oligonucleotide
attaaagtgctcacagtagcgt

SEQ ID NO: 9948 - DNA, 22 bp, Artificial Sequence
  Description of Artificial Sequence: Synthetic oligonucleotide
ttatgatattcatcaaacagca

SEQ ID NO: 9949 - DNA, 22 bp, Artificial Sequence
  Description of Artificial Sequence: Synthetic oligonucleotide
tttgttgaagaagcagaatgct

SEQ ID NO: 9950 - DNA, 22 bp, Artificial Sequence
  Description of Artificial Sequence: Synthetic oligonucleotide
ttaaatcctccattgtttgcct

SEQ ID NO: 9951 - DNA, 22 bp, Artificial Sequence
  Description of Artificial Sequence: Synthetic oligonucleotide
ttaattggagtttctttcaggc

SEQ ID NO: 9952 - DNA, 22 bp, Artificial Sequence
  Description of Artificial Sequence: Synthetic oligonucleotide
tataccttgcagctagatagga

SEQ ID NO: 9953 - DNA, 22 bp, Artificial Sequence
  Description of Artificial Sequence: Synthetic oligonucleotide
taaatggattggccgatttccc

SEQ ID NO: 9954 - DNA, 22 bp, Artificial Sequence
  Description of Artificial Sequence: Synthetic oligonucleotide
attagggataacaaccactggg

SEQ ID NO: 9955 - DNA, 22 bp, Artificial Sequence
  Description of Artificial Sequence: Synthetic oligonucleotide
ttacatttgaaaggtcgctccc

SEQ ID NO: 9956 - DNA, 22 bp, Artificial Sequence
  Description of Artificial Sequence: Synthetic oligonucleotide
ttatgtacagaatcggttacga

SEQ ID NO: 9957 - DNA, 22 bp, Artificial Sequence
  Description of Artificial Sequence: Synthetic oligonucleotide
taaattctgcagttgctctggc

SEQ ID NO: 9958 - DNA, 22 bp, Artificial Sequence
  Description of Artificial Sequence: Synthetic oligonucleotide
tttcaaatataggttcactggg

SEQ ID NO: 9959 - DNA, 22 bp, Artificial Sequence
  Description of Artificial Sequence: Synthetic oligonucleotide
ttacttcacagttaaatgaggg

SEQ ID NO: 9960 - DNA, 22 bp, Artificial Sequence
  Description of Artificial Sequence: Synthetic oligonucleotide
ttattaagaggtcatctgagcc

SEQ ID NO: 9961 - DNA, 22 bp, Artificial Sequence
  Description of Artificial Sequence: Synthetic oligonucleotide
attgtgaagaagaatgcaacca

SEQ ID NO: 9962 - DNA, 22 bp, Artificial Sequence
  Description of Artificial Sequence: Synthetic oligonucleotide
tttgtagtagggactatatgcc

SEQ ID NO: 9963 - DNA, 22 bp, Artificial Sequence
  Description of Artificial Sequence: Synthetic oligonucleotide
atagcagtacaccttcttcggt

SEQ ID NO: 9964 - DNA, 22 bp, Artificial Sequence
  Description of Artificial Sequence: Synthetic oligonucleotide
tttctctgaaatgccatgagcc

SEQ ID NO: 9965 - DNA, 22 bp, Artificial Sequence
  Description of Artificial Sequence: Synthetic oligonucleotide
tattgcattcatcataaaggca

SEQ ID NO: 9966 - DNA, 22 bp, Artificial Sequence
  Description of Artificial Sequence: Synthetic oligonucleotide
aattgctatcaccatctcagcc

SEQ ID NO: 9967 - DNA, 22 bp, Artificial Sequence
  Description of Artificial Sequence: Synthetic oligonucleotide
taacatcaagatccagtgaggt

SEQ ID NO: 9968 - DNA, 22 bp, Artificial Sequence
  Description of Artificial Sequence: Synthetic oligonucleotide
aatgtctactgcattgtcaggg

SEQ ID NO: 9969 - DNA, 22 bp, Artificial Sequence
  Description of Artificial Sequence: Synthetic oligonucleotide
tattgctcagacaggagttggt

SEQ ID NO: 9970 - DNA, 22 bp, Artificial Sequence
  Description of Artificial Sequence: Synthetic oligonucleotide
tttcttgcacacctggcagggc

SEQ ID NO: 9971 - DNA, 22 bp, Artificial Sequence
  Description of Artificial Sequence: Synthetic oligonucleotide
ttaagggtggaactgtagtgcc

SEQ ID NO: 9972 - DNA, 22 bp, Artificial Sequence
  Description of Artificial Sequence: Synthetic oligonucleotide
tttgccaaggcaattaattcca

SEQ ID NO: 9973 - DNA, 22 bp, Artificial Sequence
  Description of Artificial Sequence: Synthetic oligonucleotide
tttcaagatgcctttcttgggc

SEQ ID NO: 9974 - DNA, 22 bp, Artificial Sequence
  Description of Artificial Sequence: Synthetic oligonucleotide
atagttatcatcagtattggct

SEQ ID NO: 9975 - DNA, 22 bp, Artificial Sequence
  Description of Artificial Sequence: Synthetic oligonucleotide
ttcatggacgggatcttgtccc

SEQ ID NO: 9976 - DNA, 22 bp, Artificial Sequence
  Description of Artificial Sequence: Synthetic oligonucleotide
aatttacctgattcatggacgg

SEQ ID NO: 9977 - DNA, 22 bp, Artificial Sequence
  Description of Artificial Sequence: Synthetic oligonucleotide
ttcaactaaatcagaaagagct

SEQ ID NO: 9978 - DNA, 22 bp, Artificial Sequence
  Description of Artificial Sequence: Synthetic oligonucleotide
ttagatagacaagcaccctggt

SEQ ID NO: 9979 - DNA, 22 bp, Artificial Sequence
  Description of Artificial Sequence: Synthetic oligonucleotide
atgttaaatgagaaacgaccca

SEQ ID NO: 9980 - DNA, 22 bp, Artificial Sequence
  Description of Artificial Sequence: Synthetic oligonucleotide
ttaatggtgggtattaattcct

SEQ ID NO: 9981 - DNA, 22 bp, Artificial Sequence
  Description of Artificial Sequence: Synthetic oligonucleotide
tttccacaataggttggccgga

SEQ ID NO: 9982 - DNA, 22 bp, Artificial Sequence
  Description of Artificial Sequence: Synthetic oligonucleotide
tttcctacacagtgttggacgc

SEQ ID NO: 9983 - DNA, 22 bp, Artificial Sequence
  Description of Artificial Sequence: Synthetic oligonucleotide
aataggtagtaaagattcagct

SEQ ID NO: 9984 - DNA, 22 bp, Artificial Sequence
  Description of Artificial Sequence: Synthetic oligonucleotide
tttcacatcctggttctgtgct

SEQ ID NO: 9985 - DNA, 22 bp, Artificial Sequence
  Description of Artificial Sequence: Synthetic oligonucleotide
tatggtactgcatgcctgaggc

SEQ ID NO: 9986 - DNA, 22 bp, Artificial Sequence
  Description of Artificial Sequence: Synthetic oligonucleotide
attcacatgaaagatatcggct

SEQ ID NO: 9987 - DNA, 22 bp, Artificial Sequence
  Description of Artificial Sequence: Synthetic oligonucleotide
attgatgacaagaatatctggc

SEQ ID NO: 9988 - DNA, 22 bp, Artificial Sequence
  Description of Artificial Sequence: Synthetic oligonucleotide
tttggcatcgaggtcaccaggc

SEQ ID NO: 9989 - DNA, 22 bp, Artificial Sequence
  Description of Artificial Sequence: Synthetic oligonucleotide
ataagacatccattacattgct

SEQ ID NO: 9990 - DNA, 22 bp, Artificial Sequence
  Description of Artificial Sequence: Synthetic oligonucleotide
tacttctatgctatgggctgct

SEQ ID NO: 9991 - DNA, 22 bp, Artificial Sequence
  Description of Artificial Sequence: Synthetic oligonucleotide
tatccacacatgtgtaactgca

SEQ ID NO: 9992 - DNA, 22 bp, Artificial Sequence
  Description of Artificial Sequence: Synthetic oligonucleotide
ttaagggaacatgaatccagcc

SEQ ID NO: 9993 - DNA, 22 bp, Artificial Sequence
  Description of Artificial Sequence: Synthetic oligonucleotide
atcatgaatgaacgagttggct

SEQ ID NO: 9994 - DNA, 22 bp, Artificial Sequence
  Description of Artificial Sequence: Synthetic oligonucleotide
ttaaagtcaccttattgaacga

SEQ ID NO: 9995 - DNA, 22 bp, Artificial Sequence
  Description of Artificial Sequence: Synthetic oligonucleotide
ttagatttcgagaagtgtacca

SEQ ID NO: 9996 - DNA, 22 bp, Artificial Sequence
  Description of Artificial Sequence: Synthetic oligonucleotide
tttgatcacaatgatgtcagcg

SEQ ID NO: 9997 - DNA, 22 bp, Artificial Sequence
  Description of Artificial Sequence: Synthetic oligonucleotide
taattccatgaaaggagttgct

SEQ ID NO: 9998 - DNA, 22 bp, Artificial Sequence
  Description of Artificial Sequence: Synthetic oligonucleotide
ttataatgtgacgcttcagcct

SEQ ID NO: 9999 - DNA, 22 bp, Artificial Sequence
  Description of Artificial Sequence: Synthetic oligonucleotide
ataaacaagaacagaagagggc

SEQ ID NO: 10000 - DNA, 22 bp, Artificial Sequence
  Description of Artificial Sequence: Synthetic oligonucleotide
tataaatatagaaacgtcacct

SEQ ID NO: 10001 - DNA, 22 bp, Artificial Sequence
  Description of Artificial Sequence: Synthetic oligonucleotide
tttgtgtgagatctaggtagcc

SEQ ID NO: 10002 - DNA, 22 bp, Artificial Sequence
  Description of Artificial Sequence: Synthetic oligonucleotide
atacaacaaacatccaagagcc

SEQ ID NO: 10003 - DNA, 22 bp, Artificial Sequence
  Description of Artificial Sequence: Synthetic oligonucleotide
ttatctgataggcagagaggct

SEQ ID NO: 10004 - DNA, 22 bp, Artificial Sequence
  Description of Artificial Sequence: Synthetic oligonucleotide
aatttgactacattggcatggt

SEQ ID NO: 10005 - DNA, 22 bp, Artificial Sequence
  Description of Artificial Sequence: Synthetic oligonucleotide
attccttatagcagactcagga

SEQ ID NO: 10006 - DNA, 22 bp, Artificial Sequence
  Description of Artificial Sequence: Synthetic oligonucleotide
tttgtgaataaatgcgagtcct

SEQ ID NO: 10007 - DNA, 22 bp, Artificial Sequence
  Description of Artificial Sequence: Synthetic oligonucleotide
ttaagtctcgatgaaagaagcc

SEQ ID NO: 10008 - DNA, 22 bp, Artificial Sequence
  Description of Artificial Sequence: Synthetic oligonucleotide
atattgtgtcaatttcactggc

SEQ ID NO: 10009 - DNA, 22 bp, Artificial Sequence
  Description of Artificial Sequence: Synthetic oligonucleotide
tattgggtacacactgtggcca

SEQ ID NO: 10010 - DNA, 22 bp, Artificial Sequence
  Description of Artificial Sequence: Synthetic oligonucleotide
ttctccttctctttactttcct

SEQ ID NO: 10011 - DNA, 22 bp, Artificial Sequence
  Description of Artificial Sequence: Synthetic oligonucleotide
tttcctaaatacataaactgca

SEQ ID NO: 10012 - DNA, 22 bp, Artificial Sequence
  Description of Artificial Sequence: Synthetic oligonucleotide
tttacatacatcaaatagtggc

SEQ ID NO: 10013 - DNA, 22 bp, Artificial Sequence
  Description of Artificial Sequence: Synthetic oligonucleotide
ttatctggtaatgattgtccct

SEQ ID NO: 10014 - DNA, 22 bp, Artificial Sequence
  Description of Artificial Sequence: Synthetic oligonucleotide
taaagtgcctttcctagaacct

SEQ ID NO: 10015 - DNA, 22 bp, Artificial Sequence
  Description of Artificial Sequence: Synthetic oligonucleotide
ttaattcaagagttgtccacgg

SEQ ID NO: 10016 - DNA, 22 bp, Artificial Sequence
  Description of Artificial Sequence: Synthetic oligonucleotide
ataatatctggagttagcaggt

SEQ ID NO: 10017 - DNA, 22 bp, Artificial Sequence
  Description of Artificial Sequence: Synthetic oligonucleotide
ataactaatggatgaagaacgt

SEQ ID NO: 10018 - DNA, 22 bp, Artificial Sequence
  Description of Artificial Sequence: Synthetic oligonucleotide
tattatataagcagcacatcgt

SEQ ID NO: 10019 - DNA, 22 bp, Artificial Sequence
  Description of Artificial Sequence: Synthetic oligonucleotide
tttcatcatcaaattcaatcct

SEQ ID NO: 10020 - DNA, 22 bp, Artificial Sequence
  Description of Artificial Sequence: Synthetic oligonucleotide
attctgcagcatttatgggcct

SEQ ID NO: 10021 - DNA, 22 bp, Artificial Sequence
  Description of Artificial Sequence: Synthetic oligonucleotide
tattctgcagcatttatgggcc

SEQ ID NO: 10022 - DNA, 22 bp, Artificial Sequence
  Description of Artificial Sequence: Synthetic oligonucleotide
ttattctgcagcatttatgggc

SEQ ID NO: 10023 - DNA, 22 bp, Artificial Sequence
  Description of Artificial Sequence: Synthetic oligonucleotide
ttcttctagtaagaaatcccgg

SEQ ID NO: 10024 - DNA, 22 bp, Artificial Sequence
  Description of Artificial Sequence: Synthetic oligonucleotide
ttaaacactcagaaacaaacca

SEQ ID NO: 10025 - DNA, 22 bp, Artificial Sequence
  Description of Artificial Sequence: Synthetic oligonucleotide
attgcttatgtgtctcccaggc

SEQ ID NO: 10026 - DNA, 22 bp, Artificial Sequence
  Description of Artificial Sequence: Synthetic oligonucleotide
ataaagactgacccattgaccg

SEQ ID NO: 10027 - DNA, 22 bp, Artificial Sequence
  Description of Artificial Sequence: Synthetic oligonucleotide
atccctgtgaaagggatgaggt

SEQ ID NO: 10028 - DNA, 22 bp, Artificial Sequence
  Description of Artificial Sequence: Synthetic oligonucleotide
ttattagaccaggataacaggg

SEQ ID NO: 10029 - DNA, 22 bp, Artificial Sequence
  Description of Artificial Sequence: Synthetic oligonucleotide
tttcttcttcatgatcaaagct

SEQ ID NO: 10030 - DNA, 22 bp, Artificial Sequence
  Description of Artificial Sequence: Synthetic oligonucleotide
attagcaacaatttcagatcga

SEQ ID NO: 10031 - DNA, 22 bp, Artificial Sequence
  Description of Artificial Sequence: Synthetic oligonucleotide
tatgtttctcttataacgaggg

SEQ ID NO: 10032 - DNA, 22 bp, Artificial Sequence
  Description of Artificial Sequence: Synthetic oligonucleotide
ttaaactttcattctgtaggcc

SEQ ID NO: 10033 - DNA, 22 bp, Artificial Sequence
  Description of Artificial Sequence: Synthetic oligonucleotide
ttaacagccggactcttcaggt

SEQ ID NO: 10034 - DNA, 22 bp, Artificial Sequence
  Description of Artificial Sequence: Synthetic oligonucleotide
tttcttgcccacttcaaatcga

SEQ ID NO: 10035 - DNA, 22 bp, Artificial Sequence
  Description of Artificial Sequence: Synthetic oligonucleotide
tttaaaggcaacaggacatcct

SEQ ID NO: 10036 - DNA, 22 bp, Artificial Sequence
  Description of Artificial Sequence: Synthetic oligonucleotide
tttgcctagccagttctttggc

SEQ ID NO: 10037 - DNA, 22 bp, Artificial Sequence
  Description of Artificial Sequence: Synthetic oligonucleotide
ttaaagcttatttgcctagcca

SEQ ID NO: 10038 - DNA, 22 bp, Artificial Sequence
  Description of Artificial Sequence: Synthetic oligonucleotide
tattcgtcggaatataagagct

SEQ ID NO: 10039 - DNA, 22 bp, Artificial Sequence
  Description of Artificial Sequence: Synthetic oligonucleotide
ttagcacttcaatctgtccggg

SEQ ID NO: 10040 - DNA, 22 bp, Artificial Sequence
  Description of Artificial Sequence: Synthetic oligonucleotide
tttcattgagatactagaaggc

SEQ ID NO: 10041 - DNA, 22 bp, Artificial Sequence
  Description of Artificial Sequence: Synthetic oligonucleotide
attgcacagtagaatcagtggg

SEQ ID NO: 10042 - DNA, 22 bp, Artificial Sequence
  Description of Artificial Sequence: Synthetic oligonucleotide
tttagactggaccgaatttcca

SEQ ID NO: 10043 - DNA, 22 bp, Artificial Sequence
  Description of Artificial Sequence: Synthetic oligonucleotide
ttatccatcttgaatagctgcc

SEQ ID NO: 10044 - DNA, 22 bp, Artificial Sequence
  Description of Artificial Sequence: Synthetic oligonucleotide
atatatagctctttaaagagct

SEQ ID NO: 10045 - DNA, 22 bp, Artificial Sequence
  Description of Artificial Sequence: Synthetic oligonucleotide
atatgagtggccgcatgatcca

SEQ ID NO: 10046 - DNA, 22 bp, Artificial Sequence
  Description of Artificial Sequence: Synthetic oligonucleotide
tttcgttctgatctagatggcc

SEQ ID NO: 10047 - DNA, 22 bp, Artificial Sequence
  Description of Artificial Sequence: Synthetic oligonucleotide
tatttcgatttgagactgagcc

SEQ ID NO: 10048 - DNA, 22 bp, Artificial Sequence
  Description of Artificial Sequence: Synthetic oligonucleotide
tatagcaccagtttcatctcga

SEQ ID NO: 10049 - DNA, 22 bp, Artificial Sequence
  Description of Artificial Sequence: Synthetic oligonucleotide
tttacgactaggaatacctggt

SEQ ID NO: 10050 - DNA, 22 bp, Artificial Sequence
  Description of Artificial Sequence: Synthetic oligonucleotide
tttgtctttgtctccatgtggc

SEQ ID NO: 10051 - DNA, 22 bp, Artificial Sequence
  Description of Artificial Sequence: Synthetic oligonucleotide
tttgttaaccatatccatagca

SEQ ID NO: 10052 - DNA, 22 bp, Artificial Sequence
  Description of Artificial Sequence: Synthetic oligonucleotide
atttgagtagctcttcttcggt

SEQ ID NO: 10053 - DNA, 22 bp, Artificial Sequence
  Description of Artificial Sequence: Synthetic oligonucleotide
ttagtccaacattgaggcagcg

SEQ ID NO: 10054 - DNA, 22 bp, Artificial Sequence
  Description of Artificial Sequence: Synthetic oligonucleotide
tattaccaccaacagaaatggg

SEQ ID NO: 10055 - DNA, 22 bp, Artificial Sequence
  Description of Artificial Sequence: Synthetic oligonucleotide
tttatatacaactccaaatcct

SEQ ID NO: 10056 - DNA, 22 bp, Artificial Sequence
  Description of Artificial Sequence: Synthetic oligonucleotide
tttgggtgttatttctccacgc

SEQ ID NO: 10057 - DNA, 22 bp, Artificial Sequence
  Description of Artificial Sequence: Synthetic oligonucleotide
aatatctagcaataactgaggt

SEQ ID NO: 10058 - DNA, 22 bp, Artificial Sequence
  Description of Artificial Sequence: Synthetic oligonucleotide
aatgaaatgactctaggctgga

SEQ ID NO: 10059 - DNA, 22 bp, Artificial Sequence
  Description of Artificial Sequence: Synthetic oligonucleotide
tttatgtaagcctctgcctgga

SEQ ID NO: 10060 - DNA, 22 bp, Artificial Sequence
  Description of Artificial Sequence: Synthetic oligonucleotide
tttctctaggatcccataggca

SEQ ID NO: 10061 - DNA, 22 bp, Artificial Sequence
  Description of Artificial Sequence: Synthetic oligonucleotide
attctgcatgctattaagtgca

SEQ ID NO: 10062 - DNA, 22 bp, Artificial Sequence
  Description of Artificial Sequence: Synthetic oligonucleotide
ttgcagcagcagctcggtggcg

SEQ ID NO: 10063 - DNA, 22 bp, Artificial Sequence
  Description of Artificial Sequence: Synthetic oligonucleotide
atacggtatttcccaatggcct

SEQ ID NO: 10064 - DNA, 22 bp, Artificial Sequence
  Description of Artificial Sequence: Synthetic oligonucleotide
atcaataataggacatcttggt

SEQ ID NO: 10065 - DNA, 22 bp, Artificial Sequence
  Description of Artificial Sequence: Synthetic oligonucleotide
ataagatcagagagcaggagca

SEQ ID NO: 10066 - DNA, 22 bp, Artificial Sequence
  Description of Artificial Sequence: Synthetic oligonucleotide
ttgtaaacacctgtcagatgct

SEQ ID NO: 10067 - DNA, 22 bp, Artificial Sequence
  Description of Artificial Sequence: Synthetic oligonucleotide
taatggttcaaggaagctgcca

SEQ ID NO: 10068 - DNA, 22 bp, Artificial Sequence
  Description of Artificial Sequence: Synthetic oligonucleotide
ataaataaaccggatgattcca

SEQ ID NO: 10069 - DNA, 22 bp, Artificial Sequence
  Description of Artificial Sequence: Synthetic oligonucleotide
tattagtaatcgtttctgtcca

SEQ ID NO: 10070 - DNA, 22 bp, Artificial Sequence
  Description of Artificial Sequence: Synthetic oligonucleotide
aatagacatatccatggtgcct

SEQ ID NO: 10071 - DNA, 22 bp, Artificial Sequence
  Description of Artificial Sequence: Synthetic oligonucleotide
aattcaaatcctctgagcacgg

SEQ ID NO: 10072 - DNA, 22 bp, Artificial Sequence
  Description of Artificial Sequence: Synthetic oligonucleotide
tttatgcaaacagttaaatgct

SEQ ID NO: 10073 - DNA, 22 bp, Artificial Sequence
  Description of Artificial Sequence: Synthetic oligonucleotide
attattgatatccttctttcgg

SEQ ID NO: 10074 - DNA, 22 bp, Artificial Sequence
  Description of Artificial Sequence: Synthetic oligonucleotide
ttcatcttcactatcctctgct

SEQ ID NO: 10075 - DNA, 22 bp, Artificial Sequence
  Description of Artificial Sequence: Synthetic oligonucleotide
ttaggaaatcttcatcgctgcc

SEQ ID NO: 10076 - DNA, 22 bp, Artificial Sequence
  Description of Artificial Sequence: Synthetic oligonucleotide
attccctttgcctttcactgga

SEQ ID NO: 10077 - DNA, 22 bp, Artificial Sequence
  Description of Artificial Sequence: Synthetic oligonucleotide
atttgacatggctttcattggg

SEQ ID NO: 10078 - DNA, 22 bp, Artificial Sequence
  Description of Artificial Sequence: Synthetic oligonucleotide
tttgcacagagtactgtcaggc

SEQ ID NO: 10079 - DNA, 22 bp, Artificial Sequence
  Description of Artificial Sequence: Synthetic oligonucleotide
aatttctatgtcgttgtgacct

SEQ ID NO: 10080 - DNA, 22 bp, Artificial Sequence
  Description of Artificial Sequence: Synthetic oligonucleotide
taaatgttccggattaactgca

SEQ ID NO: 10081 - DNA, 22 bp, Artificial Sequence
  Description of Artificial Sequence: Synthetic oligonucleotide
tttggtaggtatcaaggaggct

SEQ ID NO: 10082 - DNA, 22 bp, Artificial Sequence
  Description of Artificial Sequence: Synthetic oligonucleotide
taaatattcagcaggcaaaccc

SEQ ID NO: 10083 - DNA, 22 bp, Artificial Sequence
  Description of Artificial Sequence: Synthetic oligonucleotide
attgcaatagagccactaacgg

SEQ ID NO: 10084 - DNA, 22 bp, Artificial Sequence
  Description of Artificial Sequence: Synthetic oligonucleotide
tttaacagtaacaaacttgcca

SEQ ID NO: 10085 - DNA, 22 bp, Artificial Sequence
  Description of Artificial Sequence: Synthetic oligonucleotide
tacagacatcatctacgtgggc

SEQ ID NO: 10086 - DNA, 22 bp, Artificial Sequence
  Description of Artificial Sequence: Synthetic oligonucleotide
tacagatcaaagtttaagccgc

SEQ ID NO: 10087 - DNA, 22 bp, Artificial Sequence
  Description of Artificial Sequence: Synthetic oligonucleotide
attctgaatgtcagcaggtggc

SEQ ID NO: 10088 - DNA, 22 bp, Artificial Sequence
  Description of Artificial Sequence: Synthetic oligonucleotide
aactagaatcaggtccattgca

SEQ ID NO: 10089 - DNA, 22 bp, Artificial Sequence
  Description of Artificial Sequence: Synthetic oligonucleotide
atttgatgtcatctcccatggt

SEQ ID NO: 10090 - DNA, 22 bp, Artificial Sequence
  Description of Artificial Sequence: Synthetic oligonucleotide
tttggaaagggacaaactggcc

SEQ ID NO: 10091 - DNA, 22 bp, Artificial Sequence
  Description of Artificial Sequence: Synthetic oligonucleotide
taaggtactccaaaggacacct

SEQ ID NO: 10092 - DNA, 22 bp, Artificial Sequence
  Description of Artificial Sequence: Synthetic oligonucleotide
aatttgtgcttcttaggttggt

SEQ ID NO: 10093 - DNA, 22 bp, Artificial Sequence
  Description of Artificial Sequence: Synthetic oligonucleotide
ttgtagtgaaattccttctcca

SEQ ID NO: 10094 - DNA, 22 bp, Artificial Sequence
  Description of Artificial Sequence: Synthetic oligonucleotide
tacatgatgactccaatggccc

SEQ ID NO: 10095 - DNA, 22 bp, Artificial Sequence
  Description of Artificial Sequence: Synthetic oligonucleotide
ttcccttagaggctcatgaggt

SEQ ID NO: 10096 - DNA, 22 bp, Artificial Sequence
  Description of Artificial Sequence: Synthetic oligonucleotide
tatttgccaggttcagtaggca

SEQ ID NO: 10097 - DNA, 22 bp, Artificial Sequence
  Description of Artificial Sequence: Synthetic oligonucleotide
ttacaatactgggcattgtggc

SEQ ID NO: 10098 - DNA, 22 bp, Artificial Sequence
  Description of Artificial Sequence: Synthetic oligonucleotide
aatctccactggagagaaaggt

SEQ ID NO: 10099 - DNA, 22 bp, Artificial Sequence
  Description of Artificial Sequence: Synthetic oligonucleotide
attccaagggaagtggagcgct

SEQ ID NO: 10100 - DNA, 22 bp, Artificial Sequence
  Description of Artificial Sequence: Synthetic oligonucleotide
ttatctgcgcctccctgaaggc

SEQ ID NO: 10101 - DNA, 22 bp, Artificial Sequence
  Description of Artificial Sequence: Synthetic oligonucleotide
tattcctgctggcagaggaggt

SEQ ID NO: 10102 - DNA, 22 bp, Artificial Sequence
  Description of Artificial Sequence: Synthetic oligonucleotide
attagatggtgcagaaagtgct

SEQ ID NO: 10103 - DNA, 22 bp, Artificial Sequence
  Description of Artificial Sequence: Synthetic oligonucleotide
ttgaatttgactcctctatcct

SEQ ID NO: 10104 - DNA, 22 bp, Artificial Sequence
  Description of Artificial Sequence: Synthetic oligonucleotide
tttattacaagactactgacca

SEQ ID NO: 10105 - DNA, 22 bp, Artificial Sequence
  Description of Artificial Sequence: Synthetic oligonucleotide
taaagatggagggcccacggcc

SEQ ID NO: 10106 - DNA, 22 bp, Artificial Sequence
  Description of Artificial Sequence: Synthetic oligonucleotide
atagatttcagaagaaacaggt

SEQ ID NO: 10107 - DNA, 22 bp, Artificial Sequence
  Description of Artificial Sequence: Synthetic oligonucleotide
tttgtctgggagatgggtgcct

SEQ ID NO: 10108 - DNA, 22 bp, Artificial Sequence
  Description of Artificial Sequence: Synthetic oligonucleotide
ttgtctataactttaattgcca

SEQ ID NO: 10109 - DNA, 22 bp, Artificial Sequence
  Description of Artificial Sequence: Synthetic oligonucleotide
taacttcttcaattgaaggccg

SEQ ID NO: 10110 - DNA, 22 bp, Artificial Sequence
  Description of Artificial Sequence: Synthetic oligonucleotide
tttatcaagtgcttgctagcca

SEQ ID NO: 10111 - DNA, 22 bp, Artificial Sequence
  Description of Artificial Sequence: Synthetic oligonucleotide
atacttcaatatttcattcgct

SEQ ID NO: 10112 - DNA, 22 bp, Artificial Sequence
  Description of Artificial Sequence: Synthetic oligonucleotide
aatattaggacagttatcacct

SEQ ID NO: 10113 - DNA, 22 bp, Artificial Sequence
  Description of Artificial Sequence: Synthetic oligonucleotide
atagggcaagatatttaatggc

SEQ ID NO: 10114 - DNA, 22 bp, Artificial Sequence
  Description of Artificial Sequence: Synthetic oligonucleotide
tatggaggtgctatcatctgca

SEQ ID NO: 10115 - DNA, 22 bp, Artificial Sequence
  Description of Artificial Sequence: Synthetic oligonucleotide
attatagcccatatccggtcgt

SEQ ID NO: 10116 - DNA, 22 bp, Artificial Sequence
  Description of Artificial Sequence: Synthetic oligonucleotide
ttctttgatgcaatcagcacgt

SEQ ID NO: 10117 - DNA, 22 bp, Artificial Sequence
  Description of Artificial Sequence: Synthetic oligonucleotide
atagtagacagccaagagacca

SEQ ID NO: 10118 - DNA, 22 bp, Artificial Sequence
  Description of Artificial Sequence: Synthetic oligonucleotide
tttatcactgtcagatttggca

SEQ ID NO: 10119 - DNA, 22 bp, Artificial Sequence
  Description of Artificial Sequence: Synthetic oligonucleotide
tatatcattcacagaaatagcc

SEQ ID NO: 10120 - DNA, 22 bp, Artificial Sequence
  Description of Artificial Sequence: Synthetic oligonucleotide
atttagagacaagttctttgcc

SEQ ID NO: 10121 - DNA, 22 bp, Artificial Sequence
  Description of Artificial Sequence: Synthetic oligonucleotide
tattgtccacatacattgccca

SEQ ID NO: 10122 - DNA, 22 bp, Artificial Sequence
  Description of Artificial Sequence: Synthetic oligonucleotide
atttctttacaccatccgacgt

SEQ ID NO: 10123 - DNA, 22 bp, Artificial Sequence
  Description of Artificial Sequence: Synthetic oligonucleotide
ttcacatattccctgatgaggt

SEQ ID NO: 10124 - DNA, 22 bp, Artificial Sequence
  Description of Artificial Sequence: Synthetic oligonucleotide
tttcaggttgataaactgtggg

SEQ ID NO: 10125 - DNA, 22 bp, Artificial Sequence
  Description of Artificial Sequence: Synthetic oligonucleotide
ttatatacagcaccagatcccg

SEQ ID NO: 10126 - DNA, 22 bp, Artificial Sequence
  Description of Artificial Sequence: Synthetic oligonucleotide
atcagttatcaatattactgca

SEQ ID NO: 10127 - DNA, 22 bp, Artificial Sequence
  Description of Artificial Sequence: Synthetic oligonucleotide
attcagtgcaatgagatgacct

SEQ ID NO: 10128 - DNA, 22 bp, Artificial Sequence
  Description of Artificial Sequence: Synthetic oligonucleotide
attaatctcttgtgtgtctgca

SEQ ID NO: 10129 - DNA, 22 bp, Artificial Sequence
  Description of Artificial Sequence: Synthetic oligonucleotide
aattcagtatcaatagattcca

SEQ ID NO: 10130 - DNA, 22 bp, Artificial Sequence
  Description of Artificial Sequence: Synthetic oligonucleotide
tattctcccattatggacagcg

SEQ ID NO: 10131 - DNA, 22 bp, Artificial Sequence
  Description of Artificial Sequence: Synthetic oligonucleotide
atttgtccaaattgaatatcca

SEQ ID NO: 10132 - DNA, 22 bp, Artificial Sequence
  Description of Artificial Sequence: Synthetic oligonucleotide
atttattacatggaagattggc

SEQ ID NO: 10133 - DNA, 22 bp, Artificial Sequence
  Description of Artificial Sequence: Synthetic oligonucleotide
ataattatggtccgcatagggc

SEQ ID NO: 10134 - DNA, 22 bp, Artificial Sequence
  Description of Artificial Sequence: Synthetic oligonucleotide
attaggagtggtaaatatgcct

SEQ ID NO: 10135 - DNA, 22 bp, Artificial Sequence
  Description of Artificial Sequence: Synthetic oligonucleotide
tttattggacgttggatctctc

SEQ ID NO: 10136 - DNA, 22 bp, Artificial Sequence
  Description of Artificial Sequence: Synthetic oligonucleotide
ttaacttgcttctgacacaggt

SEQ ID NO: 10137 - DNA, 22 bp, Artificial Sequence
  Description of Artificial Sequence: Synthetic oligonucleotide
ttctagtagccaaattggaggc

SEQ ID NO: 10138 - DNA, 22 bp, Artificial Sequence
  Description of Artificial Sequence: Synthetic oligonucleotide
atctgttccctctcagtgagga

SEQ ID NO: 10139 - DNA, 22 bp, Artificial Sequence
  Description of Artificial Sequence: Synthetic oligonucleotide
attctgtttcacccacagggac

SEQ ID NO: 10140 - DNA, 22 bp, Artificial Sequence
  Description of Artificial Sequence: Synthetic oligonucleotide
tttcacccacagggacatgcaa

SEQ ID NO: 10141 - DNA, 22 bp, Artificial Sequence
  Description of Artificial Sequence: Synthetic oligonucleotide
ataaagccagagtcaaactgca

SEQ ID NO: 10142 - DNA, 22 bp, Artificial Sequence
  Description of Artificial Sequence: Synthetic oligonucleotide
ataatcaaatagctctcctcca

SEQ ID NO: 10143 - DNA, 22 bp, Artificial Sequence
  Description of Artificial Sequence: Synthetic oligonucleotide
caaactgataatcttctttgcc

SEQ ID NO: 10144 - DNA, 22 bp, Artificial Sequence
  Description of Artificial Sequence: Synthetic oligonucleotide
attacaataaacagcctgccgt

SEQ ID NO: 10145 - DNA, 22 bp, Artificial Sequence
  Description of Artificial Sequence: Synthetic oligonucleotide
taaatacagatcaacctctcgt

SEQ ID NO: 10146 - DNA, 22 bp, Artificial Sequence
  Description of Artificial Sequence: Synthetic oligonucleotide
ttaatcttcacaagacttagcc

SEQ ID NO: 10147 - DNA, 22 bp, Artificial Sequence
  Description of Artificial Sequence: Synthetic oligonucleotide
ataacacgatactttgattgct

SEQ ID NO: 10148 - DNA, 22 bp, Artificial Sequence
  Description of Artificial Sequence: Synthetic oligonucleotide
tagtcctgagaagctaaagcgc

SEQ ID NO: 10149 - DNA, 22 bp, Artificial Sequence
  Description of Artificial Sequence: Synthetic oligonucleotide
atttcaaatcctctttgctgca

SEQ ID NO: 10150 - DNA, 22 bp, Artificial Sequence
  Description of Artificial Sequence: Synthetic oligonucleotide
atgctgaaggcccaagagggct

SEQ ID NO: 10151 - DNA, 22 bp, Artificial Sequence
  Description of Artificial Sequence: Synthetic oligonucleotide
tttagtcttgttggtaaaggca

SEQ ID NO: 10152 - DNA, 22 bp, Artificial Sequence
  Description of Artificial Sequence: Synthetic oligonucleotide
tttgtctctggtactagagcgt

SEQ ID NO: 10153 - DNA, 22 bp, Artificial Sequence
  Description of Artificial Sequence: Synthetic oligonucleotide
ttgttacaacaaagtgattcca

SEQ ID NO: 10154 - DNA, 22 bp, Artificial Sequence
  Description of Artificial Sequence: Synthetic oligonucleotide
ttcataagtgccatgtagccct

SEQ ID NO: 10155 - DNA, 22 bp, Artificial Sequence
  Description of Artificial Sequence: Synthetic oligonucleotide
atgacataagttatgtgtacct

SEQ ID NO: 10156 - DNA, 22 bp, Artificial Sequence
  Description of Artificial Sequence: Synthetic oligonucleotide
taaatacctcctgcaaattcct

SEQ ID NO: 10157 - DNA, 22 bp, Artificial Sequence
  Description of Artificial Sequence: Synthetic oligonucleotide
ttaggtgttctttcaggtgggc

SEQ ID NO: 10158 - DNA, 22 bp, Artificial Sequence
  Description of Artificial Sequence: Synthetic oligonucleotide
tttatgtctccatgaagcagct

SEQ ID NO: 10159 - DNA, 22 bp, Artificial Sequence
  Description of Artificial Sequence: Synthetic oligonucleotide
ttgctattgcactggtaaggcg

SEQ ID NO: 10160 - DNA, 22 bp, Artificial Sequence
  Description of Artificial Sequence: Synthetic oligonucleotide
aatatataagcagtcccttcct

SEQ ID NO: 10161 - DNA, 22 bp, Artificial Sequence
  Description of Artificial Sequence: Synthetic oligonucleotide
taatttcatcaactcagcacgg

SEQ ID NO: 10162 - DNA, 22 bp, Artificial Sequence
  Description of Artificial Sequence: Synthetic oligonucleotide
aatttcatcaactcagcacggt

SEQ ID NO: 10163 - DNA, 22 bp, Artificial Sequence
  Description of Artificial Sequence: Synthetic oligonucleotide
tttgcagagaagcactattggt

SEQ ID NO: 10164 - DNA, 22 bp, Artificial Sequence
  Description of Artificial Sequence: Synthetic oligonucleotide
ttctgctctggtgtcaggtcct

SEQ ID NO: 10165 - DNA, 22 bp, Artificial Sequence
  Description of Artificial Sequence: Synthetic oligonucleotide
aatgaactgctggttgggtcca

SEQ ID NO: 10166 - DNA, 22 bp, Artificial Sequence
  Description of Artificial Sequence: Synthetic oligonucleotide
tttaataggaaatttggctcca

SEQ ID NO: 10167 - DNA, 22 bp, Artificial Sequence
  Description of Artificial Sequence: Synthetic oligonucleotide
tataaatacagaaacctatcct

SEQ ID NO: 10168 - DNA, 22 bp, Artificial Sequence
  Description of Artificial Sequence: Synthetic oligonucleotide
tttcatttctctttcataacga

SEQ ID NO: 10169 - DNA, 22 bp, Artificial Sequence
  Description of Artificial Sequence: Synthetic oligonucleotide
aattcactgctcttcatggcct

SEQ ID NO: 10170 - DNA, 22 bp, Artificial Sequence
  Description of Artificial Sequence: Synthetic oligonucleotide
atctctcatgtcctttatccgg

SEQ ID NO: 10171 - DNA, 22 bp, Artificial Sequence
  Description of Artificial Sequence: Synthetic oligonucleotide
tttcatatctatactctgaccc

SEQ ID NO: 10172 - DNA, 22 bp, Artificial Sequence
  Description of Artificial Sequence: Synthetic oligonucleotide
atacatttcagcaacatctcgg

SEQ ID NO: 10173 - DNA, 22 bp, Artificial Sequence
  Description of Artificial Sequence: Synthetic oligonucleotide
ttcattccaaatttggaccggc

SEQ ID NO: 10174 - DNA, 22 bp, Artificial Sequence
  Description of Artificial Sequence: Synthetic oligonucleotide
atcaccaaatattctcttggca

SEQ ID NO: 10175 - DNA, 22 bp, Artificial Sequence
  Description of Artificial Sequence: Synthetic oligonucleotide
atttctatccattcaagaaggt

SEQ ID NO: 10176 - DNA, 22 bp, Artificial Sequence
  Description of Artificial Sequence: Synthetic oligonucleotide
ttacaataattgggagatccca

SEQ ID NO: 10177 - DNA, 22 bp, Artificial Sequence
  Description of Artificial Sequence: Synthetic oligonucleotide
attcatcttcatacaagtacca

SEQ ID NO: 10178 - DNA, 22 bp, Artificial Sequence
  Description of Artificial Sequence: Synthetic oligonucleotide
ttattggtcatgtgtgtctgga

SEQ ID NO: 10179 - DNA, 22 bp, Artificial Sequence
  Description of Artificial Sequence: Synthetic oligonucleotide
tagttggctgggatgatgccct

SEQ ID NO: 10180 - DNA, 22 bp, Artificial Sequence
  Description of Artificial Sequence: Synthetic oligonucleotide
atacgttagctgaatgtgtcct

SEQ ID NO: 10181 - DNA, 22 bp, Artificial Sequence
  Description of Artificial Sequence: Synthetic oligonucleotide
aatgaccaggaacttaatccgt

SEQ ID NO: 10182 - DNA, 22 bp, Artificial Sequence
  Description of Artificial Sequence: Synthetic oligonucleotide
tttccatatacttgataaggct

SEQ ID NO: 10183 - DNA, 22 bp, Artificial Sequence
  Description of Artificial Sequence: Synthetic oligonucleotide
atctgctaacttcaaatgtcca

SEQ ID NO: 10184 - DNA, 22 bp, Artificial Sequence
  Description of Artificial Sequence: Synthetic oligonucleotide
atattagcaggtttcaaatccc

SEQ ID NO: 10185 - DNA, 22 bp, Artificial Sequence
  Description of Artificial Sequence: Synthetic oligonucleotide
attatatgccagaggtcatgct

SEQ ID NO: 10186 - DNA, 22 bp, Artificial Sequence
  Description of Artificial Sequence: Synthetic oligonucleotide
taagcagcacatgtgacctggt

SEQ ID NO: 10187 - DNA, 22 bp, Artificial Sequence
  Description of Artificial Sequence: Synthetic oligonucleotide
aatctccagggaatagggccct

SEQ ID NO: 10188 - DNA, 22 bp, Artificial Sequence
  Description of Artificial Sequence: Synthetic oligonucleotide
taattcatcttcaatctgtccg

SEQ ID NO: 10189 - DNA, 22 bp, Artificial Sequence
  Description of Artificial Sequence: Synthetic oligonucleotide
tttctcttcagagcaattcccg

SEQ ID NO: 10190 - DNA, 22 bp, Artificial Sequence
  Description of Artificial Sequence: Synthetic oligonucleotide
tataacaatctatttacaccca

SEQ ID NO: 10191 - DNA, 22 bp, Artificial Sequence
  Description of Artificial Sequence: Synthetic oligonucleotide
ttgcgataattctgccagagct

SEQ ID NO: 10192 - DNA, 22 bp, Artificial Sequence
  Description of Artificial Sequence: Synthetic oligonucleotide
attatggttctccaaatcagct

SEQ ID NO: 10193 - DNA, 22 bp, Artificial Sequence
  Description of Artificial Sequence: Synthetic oligonucleotide
tttgttattctctgaatgggct

SEQ ID NO: 10194 - DNA, 22 bp, Artificial Sequence
  Description of Artificial Sequence: Synthetic oligonucleotide
atgttcatgtgcatcatgacca

SEQ ID NO: 10195 - DNA, 22 bp, Artificial Sequence
  Description of Artificial Sequence: Synthetic oligonucleotide
taactattgcaatataatggcc

SEQ ID NO: 10196 - DNA, 22 bp, Artificial Sequence
  Description of Artificial Sequence: Synthetic oligonucleotide
atatcattcacagaaatagcca

SEQ ID NO: 10197 - DNA, 22 bp, Artificial Sequence
  Description of Artificial Sequence: Synthetic oligonucleotide
atttcctcccgaatactcagga

SEQ ID NO: 10198 - DNA, 22 bp, Artificial Sequence
  Description of Artificial Sequence: Synthetic oligonucleotide
tttctctttcagttcctttggc

SEQ ID NO: 10199 - DNA, 22 bp, Artificial Sequence
  Description of Artificial Sequence: Synthetic oligonucleotide
aacacctataagttcaggtggg

SEQ ID NO: 10200 - DNA, 22 bp, Artificial Sequence
  Description of Artificial Sequence: Synthetic oligonucleotide
tttggagatgagctttatagga

SEQ ID NO: 10201 - DNA, 22 bp, Artificial Sequence
  Description of Artificial Sequence: Synthetic oligonucleotide
tttcaatccaaatggcagtggc

SEQ ID NO: 10202 - DNA, 22 bp, Artificial Sequence
  Description of Artificial Sequence: Synthetic oligonucleotide
tttctcatgaggtttatcagct

SEQ ID NO: 10203 - DNA, 22 bp, Artificial Sequence
  Description of Artificial Sequence: Synthetic oligonucleotide
ttacttgtcgatcaaatgggca

SEQ ID NO: 10204 - DNA, 22 bp, Artificial Sequence
  Description of Artificial Sequence: Synthetic oligonucleotide
atggcatttgggataaactggc

SEQ ID NO: 10205 - DNA, 22 bp, Artificial Sequence
  Description of Artificial Sequence: Synthetic oligonucleotide
tatgattccaacatgatatggc

SEQ ID NO: 10206 - DNA, 22 bp, Artificial Sequence
  Description of Artificial Sequence: Synthetic oligonucleotide
attgtacttgatgtacttgccc

SEQ ID NO: 10207 - DNA, 22 bp, Artificial Sequence
  Description of Artificial Sequence: Synthetic oligonucleotide
atggagaaataacccaaagcca

SEQ ID NO: 10208 - DNA, 22 bp, Artificial Sequence
  Description of Artificial Sequence: Synthetic oligonucleotide
ttagttcctgagagaaagcggc

SEQ ID NO: 10209 - DNA, 22 bp, Artificial Sequence
  Description of Artificial Sequence: Synthetic oligonucleotide
tttgtgaatagtcctctccggc

SEQ ID NO: 10210 - DNA, 22 bp, Artificial Sequence
  Description of Artificial Sequence: Synthetic oligonucleotide
atatcaaataccctttaagccg

SEQ ID NO: 10211 - DNA, 22 bp, Artificial Sequence
  Description of Artificial Sequence: Synthetic oligonucleotide
tttagtctttaatttcttccct

SEQ ID NO: 10212 - DNA, 22 bp, Artificial Sequence
  Description of Artificial Sequence: Synthetic oligonucleotide
tatctttatcattccgcaggcc

SEQ ID NO: 10213 - DNA, 22 bp, Artificial Sequence
  Description of Artificial Sequence: Synthetic oligonucleotide
tagtgagacatctgattgccgc

SEQ ID NO: 10214 - DNA, 22 bp, Artificial Sequence
  Description of Artificial Sequence: Synthetic oligonucleotide
attagctagattcccatctcgg

SEQ ID NO: 10215 - DNA, 22 bp, Artificial Sequence
  Description of Artificial Sequence: Synthetic oligonucleotide
ttatcatatggagggttgtcag

SEQ ID NO: 10216 - DNA, 22 bp, Artificial Sequence
  Description of Artificial Sequence: Synthetic oligonucleotide
attattgagcagctggatccgg

SEQ ID NO: 10217 - DNA, 22 bp, Artificial Sequence
  Description of Artificial Sequence: Synthetic oligonucleotide
ataatgcacaaacatgtgccgc

SEQ ID NO: 10218 - DNA, 22 bp, Artificial Sequence
  Description of Artificial Sequence: Synthetic oligonucleotide
ttactttcactaggtatgacgc

SEQ ID NO: 10219 - DNA, 22 bp, Artificial Sequence
  Description of Artificial Sequence: Synthetic oligonucleotide
tttgacttcatcattctctgcc

SEQ ID NO: 10220 - DNA, 22 bp, Artificial Sequence
  Description of Artificial Sequence: Synthetic oligonucleotide
aataaatctgttgtactcggcc

SEQ ID NO: 10221 - DNA, 22 bp, Artificial Sequence
  Description of Artificial Sequence: Synthetic oligonucleotide
ttgagagaccagggcaaaggcg

SEQ ID NO: 10222 - DNA, 22 bp, Artificial Sequence
  Description of Artificial Sequence: Synthetic oligonucleotide
aatcagtggaatatgccttccc

SEQ ID NO: 10223 - DNA, 22 bp, Artificial Sequence
  Description of Artificial Sequence: Synthetic oligonucleotide
tttattagtaccacttggtccc

SEQ ID NO: 10224 - DNA, 22 bp, Artificial Sequence
  Description of Artificial Sequence: Synthetic oligonucleotide
taaacgtctccttgcaagtccc

SEQ ID NO: 10225 - DNA, 22 bp, Artificial Sequence
  Description of Artificial Sequence: Synthetic oligonucleotide
ttattacaaatgttgacatccg

SEQ ID NO: 10226 - DNA, 22 bp, Artificial Sequence
  Description of Artificial Sequence: Synthetic oligonucleotide
tttcaccttggagtagctgccc

SEQ ID NO: 10227 - DNA, 22 bp, Artificial Sequence
  Description of Artificial Sequence: Synthetic oligonucleotide
ataacttattacagtgacgccc

SEQ ID NO: 10228 - DNA, 22 bp, Artificial Sequence
  Description of Artificial Sequence: Synthetic oligonucleotide
ttaaggagtcgatttcataccg

SEQ ID NO: 10229 - DNA, 22 bp, Artificial Sequence
  Description of Artificial Sequence: Synthetic oligonucleotide
atcaaagaggaatttgtcaccc

SEQ ID NO: 10230 - DNA, 22 bp, Artificial Sequence
  Description of Artificial Sequence: Synthetic oligonucleotide
attcctttactcactctttggt

SEQ ID NO: 10231 - DNA, 22 bp, Artificial Sequence
  Description of Artificial Sequence: Synthetic oligonucleotide
tatcggtttcaattgctttggt

SEQ ID NO: 10232 - DNA, 22 bp, Artificial Sequence
  Description of Artificial Sequence: Synthetic oligonucleotide
atgcacagtgattctgattgga

SEQ ID NO: 10233 - DNA, 22 bp, Artificial Sequence
  Description of Artificial Sequence: Synthetic oligonucleotide
atacaccactacatcctgtggt

SEQ ID NO: 10234 - DNA, 22 bp, Artificial Sequence
  Description of Artificial Sequence: Synthetic oligonucleotide
tatgggtagaaaggtctctggt

SEQ ID NO: 10235 - DNA, 22 bp, Artificial Sequence
  Description of Artificial Sequence: Synthetic oligonucleotide
tttcacttcaatttcagatgga

SEQ ID NO: 10236 - DNA, 22 bp, Artificial Sequence
  Description of Artificial Sequence: Synthetic oligonucleotide
attgactcccgcaaggaatggt

SEQ ID NO: 10237 - DNA, 22 bp, Artificial Sequence
  Description of Artificial Sequence: Synthetic oligonucleotide
atttcagcaaaggagggccggt

SEQ ID NO: 10238 - DNA, 22 bp, Artificial Sequence
  Description of Artificial Sequence: Synthetic oligonucleotide
ttatatgtaaactcactgagga

SEQ ID NO: 10239 - DNA, 22 bp, Artificial Sequence
  Description of Artificial Sequence: Synthetic oligonucleotide
attacagagagggcacacaggt

SEQ ID NO: 10240 - DNA, 22 bp, Artificial Sequence
  Description of Artificial Sequence: Synthetic oligonucleotide
ttctggaggcacataataaggt

SEQ ID NO: 10241 - DNA, 22 bp, Artificial Sequence
  Description of Artificial Sequence: Synthetic oligonucleotide
attaattcagggcgacaaaggt

SEQ ID NO: 10242 - DNA, 22 bp, Artificial Sequence
  Description of Artificial Sequence: Synthetic oligonucleotide
atattcacagagctcagcacgt

SEQ ID NO: 10243 - DNA, 22 bp, Artificial Sequence
  Description of Artificial Sequence: Synthetic oligonucleotide
tttctataagtgcatcagtgct

SEQ ID NO: 10244 - DNA, 22 bp, Artificial Sequence
  Description of Artificial Sequence: Synthetic oligonucleotide
atacttcttggctctctctgct

SEQ ID NO: 10245 - DNA, 22 bp, Artificial Sequence
  Description of Artificial Sequence: Synthetic oligonucleotide
attatagcggcaaggacctgca

SEQ ID NO: 10246 - DNA, 22 bp, Artificial Sequence
  Description of Artificial Sequence: Synthetic oligonucleotide
tttgacttccctttgaaatgct

SEQ ID NO: 10247 - DNA, 22 bp, Artificial Sequence
  Description of Artificial Sequence: Synthetic oligonucleotide
attccacatcatcttgatggca

SEQ ID NO: 10248 - DNA, 22 bp, Artificial Sequence
  Description of Artificial Sequence: Synthetic oligonucleotide
taaattacaggaaaggatggct

SEQ ID NO: 10249 - DNA, 22 bp, Artificial Sequence
  Description of Artificial Sequence: Synthetic oligonucleotide
tttatttctgaagctgtccgct

SEQ ID NO: 10250 - DNA, 22 bp, Artificial Sequence
  Description of Artificial Sequence: Synthetic oligonucleotide
ttaataaagtacttggcacgct

SEQ ID NO: 10251 - DNA, 22 bp, Artificial Sequence
  Description of Artificial Sequence: Synthetic oligonucleotide
atacttgaagaaggaatttcca

SEQ ID NO: 10252 - DNA, 22 bp, Artificial Sequence
  Description of Artificial Sequence: Synthetic oligonucleotide
atattacattcgaaggtcgcgc

SEQ ID NO: 10253 - DNA, 22 bp, Artificial Sequence
  Description of Artificial Sequence: Synthetic oligonucleotide
aatccaactagcagtgactcct

SEQ ID NO: 10254 - DNA, 22 bp, Artificial Sequence
  Description of Artificial Sequence: Synthetic oligonucleotide
tttaatcttctttgtaactcca

SEQ ID NO: 10255 - DNA, 22 bp, Artificial Sequence
  Description of Artificial Sequence: Synthetic oligonucleotide
ttacagatatccatcatatcca

SEQ ID NO: 10256 - DNA, 22 bp, Artificial Sequence
  Description of Artificial Sequence: Synthetic oligonucleotide
atagttgatgaaagatttgcca

SEQ ID NO: 10257 - DNA, 22 bp, Artificial Sequence
  Description of Artificial Sequence: Synthetic oligonucleotide
taaggaaatcggcctgtggcca

SEQ ID NO: 10258 - DNA, 22 bp, Artificial Sequence
  Description of Artificial Sequence: Synthetic oligonucleotide
tactccattggtctcaaggcct

SEQ ID NO: 10259 - DNA, 22 bp, Artificial Sequence
  Description of Artificial Sequence: Synthetic oligonucleotide
attgataaatctgcaatttggg

SEQ ID NO: 10260 - DNA, 22 bp, Artificial Sequence
  Description of Artificial Sequence: Synthetic oligonucleotide
taataggaacactttcgttggg

SEQ ID NO: 10261 - DNA, 22 bp, Artificial Sequence
  Description of Artificial Sequence: Synthetic oligonucleotide
ttaaagctgctaaaccaatggc

SEQ ID NO: 10262 - DNA, 22 bp, Artificial Sequence
  Description of Artificial Sequence: Synthetic oligonucleotide
ttactagcagagaggacagggc

SEQ ID NO: 10263 - DNA, 22 bp, Artificial Sequence
  Description of Artificial Sequence: Synthetic oligonucleotide
tatttatagcatttcacccggc

SEQ ID NO: 10264 - DNA, 22 bp, Artificial Sequence
  Description of Artificial Sequence: Synthetic oligonucleotide
aacttctacaatatctggacgg

SEQ ID NO: 10265 - DNA, 22 bp, Artificial Sequence
  Description of Artificial Sequence: Synthetic oligonucleotide
aatgcgtaaattctccagaggc

SEQ ID NO: 10266 - DNA, 22 bp, Artificial Sequence
  Description of Artificial Sequence: Synthetic oligonucleotide
ataaacacttaggtgaagaggg

SEQ ID NO: 10267 - DNA, 22 bp, Artificial Sequence
  Description of Artificial Sequence: Synthetic oligonucleotide
aataagttaagaccaaagaggg

SEQ ID NO: 10268 - DNA, 22 bp, Artificial Sequence
  Description of Artificial Sequence: Synthetic oligonucleotide
atcatagttcacaacttcaggg

SEQ ID NO: 10269 - DNA, 22 bp, Artificial Sequence
  Description of Artificial Sequence: Synthetic oligonucleotide
atgacgttgaagttgcacaggg

SEQ ID NO: 10270 - DNA, 22 bp, Artificial Sequence
  Description of Artificial Sequence: Synthetic oligonucleotide
atcatatggaagaatatctcgg

SEQ ID NO: 10271 - DNA, 22 bp, Artificial Sequence
  Description of Artificial Sequence: Synthetic oligonucleotide
tttcgataccatttcacaccgg

SEQ ID NO: 10272 - DNA, 22 bp, Artificial Sequence
  Description of Artificial Sequence: Synthetic oligonucleotide
taaaggaatttcttccaaacgc

SEQ ID NO: 10273 - DNA, 22 bp, Artificial Sequence
  Description of Artificial Sequence: Synthetic oligonucleotide
atacggtttcatgaactgggcc

SEQ ID NO: 10274 - DNA, 22 bp, Artificial Sequence
  Description of Artificial Sequence: Synthetic oligonucleotide
atatagtaaggctgacagagcg

SEQ ID NO: 10275 - DNA, 22 bp, Artificial Sequence
  Description of Artificial Sequence: Synthetic oligonucleotide
atatcatctgtatggaagagcg

SEQ ID NO: 10276 - DNA, 22 bp, Artificial Sequence
  Description of Artificial Sequence: Synthetic oligonucleotide
atactgagtggctatgcttccg

SEQ ID NO: 10277 - DNA, 22 bp, Artificial Sequence
  Description of Artificial Sequence: Synthetic oligonucleotide
ataaacaattccaaactgtccg

SEQ ID NO: 10278 - DNA, 22 bp, Artificial Sequence
  Description of Artificial Sequence: Synthetic oligonucleotide
atatcagatacagaaccagccc

SEQ ID NO: 10279 - DNA, 22 bp, Artificial Sequence
  Description of Artificial Sequence: Synthetic oligonucleotide
atatataaccatataacacccg

SEQ ID NO: 10280 - DNA, 22 bp, Artificial Sequence
  Description of Artificial Sequence: Synthetic oligonucleotide
tattgaggttacgcagagaccg

SEQ ID NO: 10281 - DNA, 22 bp, Artificial Sequence
  Description of Artificial Sequence: Synthetic oligonucleotide
ttactcttgaggtctctgtgga

SEQ ID NO: 10282 - DNA, 22 bp, Artificial Sequence
  Description of Artificial Sequence: Synthetic oligonucleotide
tttatgtggaccagtctctggt

SEQ ID NO: 10283 - DNA, 22 bp, Artificial Sequence
  Description of Artificial Sequence: Synthetic oligonucleotide
tttctaactgaaagacgacgga

SEQ ID NO: 10284 - DNA, 22 bp, Artificial Sequence
  Description of Artificial Sequence: Synthetic oligonucleotide
ataagagctgaatgagcatgcc

SEQ ID NO: 10285 - DNA, 22 bp, Artificial Sequence
  Description of Artificial Sequence: Synthetic oligonucleotide
atgtcccagaagataatgaggt

SEQ ID NO: 10286 - DNA, 22 bp, Artificial Sequence
  Description of Artificial Sequence: Synthetic oligonucleotide
atataggtcaagtctaagtcga

SEQ ID NO: 10287 - DNA, 22 bp, Artificial Sequence
  Description of Artificial Sequence: Synthetic oligonucleotide
atacttgtgctcacacaggcgt

SEQ ID NO: 10288 - DNA, 22 bp, Artificial Sequence
  Description of Artificial Sequence: Synthetic oligonucleotide
aatatggaataaattcttccgt

SEQ ID NO: 10289 - DNA, 22 bp, Artificial Sequence
  Description of Artificial Sequence: Synthetic oligonucleotide
taatggtagcagatagtgacgt

SEQ ID NO: 10290 - DNA, 22 bp, Artificial Sequence
  Description of Artificial Sequence: Synthetic oligonucleotide
atactccttgtcattatctgca

SEQ ID NO: 10291 - DNA, 22 bp, Artificial Sequence
  Description of Artificial Sequence: Synthetic oligonucleotide
tattctccacagaactgctgct

SEQ ID NO: 10292 - DNA, 22 bp, Artificial Sequence
  Description of Artificial Sequence: Synthetic oligonucleotide
tttgttcagtgctttcactgca

SEQ ID NO: 10293 - DNA, 22 bp, Artificial Sequence
  Description of Artificial Sequence: Synthetic oligonucleotide
tattctgaatgttatattggct

SEQ ID NO: 10294 - DNA, 22 bp, Artificial Sequence
  Description of Artificial Sequence: Synthetic oligonucleotide
atttgtggtcacattgatggct

SEQ ID NO: 10295 - DNA, 22 bp, Artificial Sequence
  Description of Artificial Sequence: Synthetic oligonucleotide
atttatgttcttagtctgggct

SEQ ID NO: 10296 - DNA, 22 bp, Artificial Sequence
  Description of Artificial Sequence: Synthetic oligonucleotide
ttctgtatcaacacactgagca

SEQ ID NO: 10297 - DNA, 22 bp, Artificial Sequence
  Description of Artificial Sequence: Synthetic oligonucleotide
aatttcggtaagagatgcagct

SEQ ID NO: 10298 - DNA, 22 bp, Artificial Sequence
  Description of Artificial Sequence: Synthetic oligonucleotide
ttacagtaagggtggtccagca

SEQ ID NO: 10299 - DNA, 22 bp, Artificial Sequence
  Description of Artificial Sequence: Synthetic oligonucleotide
ttgagttattcggttaccagct

SEQ ID NO: 10300 - DNA, 22 bp, Artificial Sequence
  Description of Artificial Sequence: Synthetic oligonucleotide
attgcgtagaccagaaattcca

SEQ ID NO: 10301 - DNA, 22 bp, Artificial Sequence
  Description of Artificial Sequence: Synthetic oligonucleotide
aatactgatcacactttctcct

SEQ ID NO: 10302 - DNA, 22 bp, Artificial Sequence
  Description of Artificial Sequence: Synthetic oligonucleotide
ttaagctttgcttcaatctcct

SEQ ID NO: 10303 - DNA, 22 bp, Artificial Sequence
  Description of Artificial Sequence: Synthetic oligonucleotide
tttcacaagatgataacctcct

SEQ ID NO: 10304 - DNA, 22 bp, Artificial Sequence
  Description of Artificial Sequence: Synthetic oligonucleotide
tacaccttacacatgaactcca

SEQ ID NO: 10305 - DNA, 22 bp, Artificial Sequence
  Description of Artificial Sequence: Synthetic oligonucleotide
tttaggatgaagttctcatcct

SEQ ID NO: 10306 - DNA, 22 bp, Artificial Sequence
  Description of Artificial Sequence: Synthetic oligonucleotide
atagccatcgatgtaattgcca

SEQ ID NO: 10307 - DNA, 22 bp, Artificial Sequence
  Description of Artificial Sequence: Synthetic oligonucleotide
tttcttgtagggcttctggcca

SEQ ID NO: 10308 - DNA, 22 bp, Artificial Sequence
  Description of Artificial Sequence: Synthetic oligonucleotide
ttattggcacatgaacaagcct

SEQ ID NO: 10309 - DNA, 22 bp, Artificial Sequence
  Description of Artificial Sequence: Synthetic oligonucleotide
atttctatggcagttattccca

SEQ ID NO: 10310 - DNA, 22 bp, Artificial Sequence
  Description of Artificial Sequence: Synthetic oligonucleotide
aatgttatctcctttaggccca

SEQ ID NO: 10311 - DNA, 22 bp, Artificial Sequence
  Description of Artificial Sequence: Synthetic oligonucleotide
taatgaatggaacagcggacca

SEQ ID NO: 10312 - DNA, 22 bp, Artificial Sequence
  Description of Artificial Sequence: Synthetic oligonucleotide
aatcttctggaactagtcacct

SEQ ID NO: 10313 - DNA, 22 bp, Artificial Sequence
  Description of Artificial Sequence: Synthetic oligonucleotide
taatgtctttgtacttcttggc

SEQ ID NO: 10314 - DNA, 22 bp, Artificial Sequence
  Description of Artificial Sequence: Synthetic oligonucleotide
tttggtgatgccttattgtggc

SEQ ID NO: 10315 - DNA, 22 bp, Artificial Sequence
  Description of Artificial Sequence: Synthetic oligonucleotide
ataaatagaggcttcctctggg

SEQ ID NO: 10316 - DNA, 22 bp, Artificial Sequence
  Description of Artificial Sequence: Synthetic oligonucleotide
tattcgtcggaatataagagcc

SEQ ID NO: 10317 - DNA, 22 bp, Artificial Sequence
  Description of Artificial Sequence: Synthetic oligonucleotide
ttgatctggcatcaaagtgggc

SEQ ID NO: 10318 - DNA, 22 bp, Artificial Sequence
  Description of Artificial Sequence: Synthetic oligonucleotide
atacatcatcaacctttagggc

SEQ ID NO: 10319 - DNA, 22 bp, Artificial Sequence
  Description of Artificial Sequence: Synthetic oligonucleotide
tttctcagcacctgaatgcggc

SEQ ID NO: 10320 - DNA, 22 bp, Artificial Sequence
  Description of Artificial Sequence: Synthetic oligonucleotide
ttcttgtgcgcgcggaagaggg

SEQ ID NO: 10321 - DNA, 22 bp, Artificial Sequence
  Description of Artificial Sequence: Synthetic oligonucleotide
aatggtacagtcctcatcaggc

SEQ ID NO: 10322 - DNA, 22 bp, Artificial Sequence
  Description of Artificial Sequence: Synthetic oligonucleotide
aattccaatacaattaccaggg

SEQ ID NO: 10323 - DNA, 22 bp, Artificial Sequence
  Description of Artificial Sequence: Synthetic oligonucleotide
ttaaagcaattcttgcattcgc

SEQ ID NO: 10324 - DNA, 22 bp, Artificial Sequence
  Description of Artificial Sequence: Synthetic oligonucleotide
attgcttcagacagggtgtcgc

SEQ ID NO: 10325 - DNA, 22 bp, Artificial Sequence
  Description of Artificial Sequence: Synthetic oligonucleotide
atttgcttgtatttgaactcgc

SEQ ID NO: 10326 - DNA, 22 bp, Artificial Sequence
  Description of Artificial Sequence: Synthetic oligonucleotide
attcttcaacagaacattccgc

SEQ ID NO: 10327 - DNA, 22 bp, Artificial Sequence
  Description of Artificial Sequence: Synthetic oligonucleotide
ttccatgacgaagtacagccgg

SEQ ID NO: 10328 - DNA, 22 bp, Artificial Sequence
  Description of Artificial Sequence: Synthetic oligonucleotide
attatccggtatacaggcccgg

SEQ ID NO: 10329 - DNA, 22 bp, Artificial Sequence
  Description of Artificial Sequence: Synthetic oligonucleotide
atacagcatccagatgactgcc

SEQ ID NO: 10330 - DNA, 22 bp, Artificial Sequence
  Description of Artificial Sequence: Synthetic oligonucleotide
ataaagcaatctaatcttggcc

SEQ ID NO: 10331 - DNA, 22 bp, Artificial Sequence
  Description of Artificial Sequence: Synthetic oligonucleotide
atttgtaactccagctcaggcc

SEQ ID NO: 10332 - DNA, 22 bp, Artificial Sequence
  Description of Artificial Sequence: Synthetic oligonucleotide
tttgaccatgaggttaaaggcc

SEQ ID NO: 10333 - DNA, 22 bp, Artificial Sequence
  Description of Artificial Sequence: Synthetic oligonucleotide
atacgtactcatactcatcgcg

SEQ ID NO: 10334 - DNA, 22 bp, Artificial Sequence
  Description of Artificial Sequence: Synthetic oligonucleotide
ttattctaatcagtgccttccc

SEQ ID NO: 10335 - DNA, 22 bp, Artificial Sequence
  Description of Artificial Sequence: Synthetic oligonucleotide
atattgtcactcttgatgtccc

SEQ ID NO: 10336 - DNA, 22 bp, Artificial Sequence
  Description of Artificial Sequence: Synthetic oligonucleotide
tttgaggatggctgtgttgccc

SEQ ID NO: 10337 - DNA, 22 bp, Artificial Sequence
  Description of Artificial Sequence: Synthetic oligonucleotide
tatagtctgtgaactcttgccc

SEQ ID NO: 10338 - DNA, 22 bp, Artificial Sequence
  Description of Artificial Sequence: Synthetic oligonucleotide
aatacggttgagattctggccc

SEQ ID NO: 10339 - DNA, 22 bp, Artificial Sequence
  Description of Artificial Sequence: Synthetic oligonucleotide
attcctttaaacttgcaggccc

SEQ ID NO: 10340 - DNA, 22 bp, Artificial Sequence
  Description of Artificial Sequence: Synthetic oligonucleotide
attgtaggtgggctggtagccc

SEQ ID NO: 10341 - DNA, 22 bp, Artificial Sequence
  Description of Artificial Sequence: Synthetic oligonucleotide
aagtatcaacaatttcatcccg

SEQ ID NO: 10342 - DNA, 22 bp, Artificial Sequence
  Description of Artificial Sequence: Synthetic oligonucleotide
tttcatgtagctcttctgcccg

SEQ ID NO: 10343 - DNA, 22 bp, Artificial Sequence
  Description of Artificial Sequence: Synthetic oligonucleotide
atttgtttaaggtcgcattggt

SEQ ID NO: 10344 - DNA, 22 bp, Artificial Sequence
  Description of Artificial Sequence: Synthetic oligonucleotide
ttattctcaatgatgtggtggt

SEQ ID NO: 10345 - DNA, 22 bp, Artificial Sequence
  Description of Artificial Sequence: Synthetic oligonucleotide
attacatgtgcttcagtctggt

SEQ ID NO: 10346 - DNA, 22 bp, Artificial Sequence
  Description of Artificial Sequence: Synthetic oligonucleotide
atattcaaataccaaagctggt

SEQ ID NO: 10347 - DNA, 22 bp, Artificial Sequence
  Description of Artificial Sequence: Synthetic oligonucleotide
ttctctgactccacatcctgga

SEQ ID NO: 10348 - DNA, 22 bp, Artificial Sequence
  Description of Artificial Sequence: Synthetic oligonucleotide
tacaacgatcccatttcatggt

SEQ ID NO: 10349 - DNA, 22 bp, Artificial Sequence
  Description of Artificial Sequence: Synthetic oligonucleotide
ttcaagcagcatcttaaatggt

SEQ ID NO: 10350 - DNA, 22 bp, Artificial Sequence
  Description of Artificial Sequence: Synthetic oligonucleotide
aatgctgatttcttcaaatggt

SEQ ID NO: 10351 - DNA, 22 bp, Artificial Sequence
  Description of Artificial Sequence: Synthetic oligonucleotide
taaatatacttcattaggaggt

SEQ ID NO: 10352 - DNA, 22 bp, Artificial Sequence
  Description of Artificial Sequence: Synthetic oligonucleotide
atgtactgtgatgttccaagga

SEQ ID NO: 10353 - DNA, 22 bp, Artificial Sequence
  Description of Artificial Sequence: Synthetic oligonucleotide
tttaatgtgtattcaaagtcgt

SEQ ID NO: 10354 - DNA, 22 bp, Artificial Sequence
  Description of Artificial Sequence: Synthetic oligonucleotide
ttctcatagaggctcatggcgt

SEQ ID NO: 10355 - DNA, 22 bp, Artificial Sequence
  Description of Artificial Sequence: Synthetic oligonucleotide
ataaccattaaccaaatcccga

SEQ ID NO: 10356 - DNA, 22 bp, Artificial Sequence
  Description of Artificial Sequence: Synthetic oligonucleotide
tttgataatatgaggatgacga

SEQ ID NO: 10357 - DNA, 22 bp, Artificial Sequence
  Description of Artificial Sequence: Synthetic oligonucleotide
tatctaatacatcttgccacgt

SEQ ID NO: 10358 - DNA, 22 bp, Artificial Sequence
  Description of Artificial Sequence: Synthetic oligonucleotide
ttgctctattcaatgaccacga

SEQ ID NO: 10359 - DNA, 22 bp, Artificial Sequence
  Description of Artificial Sequence: Synthetic oligonucleotide
tttattatgcatgcttattgca

SEQ ID NO: 10360 - DNA, 22 bp, Artificial Sequence
  Description of Artificial Sequence: Synthetic oligonucleotide
ataactttcaagcttgattgct

SEQ ID NO: 10361 - DNA, 22 bp, Artificial Sequence
  Description of Artificial Sequence: Synthetic oligonucleotide
taaatctgtcaacttcactgct

SEQ ID NO: 10362 - DNA, 22 bp, Artificial Sequence
  Description of Artificial Sequence: Synthetic oligonucleotide
atagctgagcttattccatgct

SEQ ID NO: 10363 - DNA, 22 bp, Artificial Sequence
  Description of Artificial Sequence: Synthetic oligonucleotide
tttaatgcctccagaacatgct

SEQ ID NO: 10364 - DNA, 22 bp, Artificial Sequence
  Description of Artificial Sequence: Synthetic oligonucleotide
tttggaatgcacattgtgggct

SEQ ID NO: 10365 - DNA, 22 bp, Artificial Sequence
  Description of Artificial Sequence: Synthetic oligonucleotide
ttagctgatgctgagctgggca

SEQ ID NO: 10366 - DNA, 22 bp, Artificial Sequence
  Description of Artificial Sequence: Synthetic oligonucleotide
tatacagtaggagagctaggct

SEQ ID NO: 10367 - DNA, 22 bp, Artificial Sequence
  Description of Artificial Sequence: Synthetic oligonucleotide
tattccatgcttgtctaaggct

SEQ ID NO: 10368 - DNA, 22 bp, Artificial Sequence
  Description of Artificial Sequence: Synthetic oligonucleotide
taacacttaggttgtaaaggca

SEQ ID NO: 10369 - DNA, 22 bp, Artificial Sequence
  Description of Artificial Sequence: Synthetic oligonucleotide
taaacaattcctaatgttcgca

SEQ ID NO: 10370 - DNA, 22 bp, Artificial Sequence
  Description of Artificial Sequence: Synthetic oligonucleotide
atgcaaatcccaaatatacgca

SEQ ID NO: 10371 - DNA, 22 bp, Artificial Sequence
  Description of Artificial Sequence: Synthetic oligonucleotide
ttatctgtggtctcagccagct

SEQ ID NO: 10372 - DNA, 22 bp, Artificial Sequence
  Description of Artificial Sequence: Synthetic oligonucleotide
ttacttagaggagataccagca

SEQ ID NO: 10373 - DNA, 22 bp, Artificial Sequence
  Description of Artificial Sequence: Synthetic oligonucleotide
attgctggatctagagacagca

SEQ ID NO: 10374 - DNA, 22 bp, Artificial Sequence
  Description of Artificial Sequence: Synthetic oligonucleotide
aatcttgatgtgggtaacagct

SEQ ID NO: 10375 - DNA, 22 bp, Artificial Sequence
  Description of Artificial Sequence: Synthetic oligonucleotide
aatattggtatattcatgtcct

SEQ ID NO: 10376 - DNA, 22 bp, Artificial Sequence
  Description of Artificial Sequence: Synthetic oligonucleotide
tatctctatagttatatctcca

SEQ ID NO: 10377 - DNA, 22 bp, Artificial Sequence
  Description of Artificial Sequence: Synthetic oligonucleotide
tatatcatcagctgctgctcca

SEQ ID NO: 10378 - DNA, 22 bp, Artificial Sequence
  Description of Artificial Sequence: Synthetic oligonucleotide
aatatccagaacagaacctcca

SEQ ID NO: 10379 - DNA, 22 bp, Artificial Sequence
  Description of Artificial Sequence: Synthetic oligonucleotide
ttaaatgatctgtttcttccct

SEQ ID NO: 10380 - DNA, 22 bp, Artificial Sequence
  Description of Artificial Sequence: Synthetic oligonucleotide
aataaataaggaccagctccca

SEQ ID NO: 10381 - DNA, 22 bp, Artificial Sequence
  Description of Artificial Sequence: Synthetic oligonucleotide
aatcttgaaggtaatactccct

SEQ ID NO: 10382 - DNA, 22 bp, Artificial Sequence
  Description of Artificial Sequence: Synthetic oligonucleotide
taagtagacatcacatttacct

SEQ ID NO: 10383 - DNA, 22 bp, Artificial Sequence
  Description of Artificial Sequence: Synthetic oligonucleotide
tttcaggtccatgaagtgacca

SEQ ID NO: 10384 - DNA, 22 bp, Artificial Sequence
  Description of Artificial Sequence: Synthetic oligonucleotide
atagagttcaacataatcacca

SEQ ID NO: 10385 - DNA, 22 bp, Artificial Sequence
  Description of Artificial Sequence: Synthetic oligonucleotide
taaacagttctgatttccacca

SEQ ID NO: 10386 - DNA, 22 bp, Artificial Sequence
  Description of Artificial Sequence: Synthetic oligonucleotide
ttcttcttgaggatcttgaccg

SEQ ID NO: 10387 - DNA, 22 bp, Artificial Sequence
  Description of Artificial Sequence: Synthetic oligonucleotide
atataaatagaagtccagtcca

SEQ ID NO: 10388 - DNA, 22 bp, Artificial Sequence
  Description of Artificial Sequence: Synthetic oligonucleotide
attcatgtgcaagtagctggca

SEQ ID NO: 10389 - DNA, 22 bp, Artificial Sequence
  Description of Artificial Sequence: Synthetic oligonucleotide
ttatcaataggttcaataagga

SEQ ID NO: 10390 - DNA, 22 bp, Artificial Sequence
  Description of Artificial Sequence: Synthetic oligonucleotide
ttaatatcctgttccacctgct

SEQ ID NO: 10391 - DNA, 22 bp, Artificial Sequence
  Description of Artificial Sequence: Synthetic oligonucleotide
tttgcattgcaggagtcttggg

SEQ ID NO: 10392 - DNA, 22 bp, Artificial Sequence
  Description of Artificial Sequence: Synthetic oligonucleotide
tttggcaacaatactgcttggg

SEQ ID NO: 10393 - DNA, 22 bp, Artificial Sequence
  Description of Artificial Sequence: Synthetic oligonucleotide
aatacagcacattgtccaccgt

SEQ ID NO: 10394 - DNA, 22 bp, Artificial Sequence
  Description of Artificial Sequence: Synthetic oligonucleotide
atacatgtgatgaggaacaccc

SEQ ID NO: 10395 - DNA, 22 bp, Artificial Sequence
  Description of Artificial Sequence: Synthetic oligonucleotide
tttcctgagtgttctgggagct

SEQ ID NO: 10396 - DNA, 22 bp, Artificial Sequence
  Description of Artificial Sequence: Synthetic oligonucleotide
tatagctccgagccaaatgggc

SEQ ID NO: 10397 - DNA, 22 bp, Artificial Sequence
  Description of Artificial Sequence: Synthetic oligonucleotide
ttattctactgaaatcagaggc

SEQ ID NO: 10398 - DNA, 22 bp, Artificial Sequence
  Description of Artificial Sequence: Synthetic oligonucleotide
atattgcataacaagctaacca

SEQ ID NO: 10399 - DNA, 22 bp, Artificial Sequence
  Description of Artificial Sequence: Synthetic oligonucleotide
aataattgccaattacacagca

SEQ ID NO: 10400 - DNA, 22 bp, Artificial Sequence
  Description of Artificial Sequence: Synthetic oligonucleotide
aatgtaatgcaaatactgacga

SEQ ID NO: 10401 - DNA, 22 bp, Artificial Sequence
  Description of Artificial Sequence: Synthetic oligonucleotide
tttgttctcctcaagctctgca

SEQ ID NO: 10402 - DNA, 22 bp, Artificial Sequence
  Description of Artificial Sequence: Synthetic oligonucleotide
ttggtcaatctcagaatctcca

SEQ ID NO: 10403 - DNA, 22 bp, Artificial Sequence
  Description of Artificial Sequence: Synthetic oligonucleotide
ttattctgtaacatgcactggg

SEQ ID NO: 10404 - DNA, 22 bp, Artificial Sequence
  Description of Artificial Sequence: Synthetic oligonucleotide
ttatctggagttgtctgttcgt

SEQ ID NO: 10405 - DNA, 22 bp, Artificial Sequence
  Description of Artificial Sequence: Synthetic oligonucleotide
tagttctttccttattgctgcc

SEQ ID NO: 10406 - DNA, 22 bp, Artificial Sequence
  Description of Artificial Sequence: Synthetic oligonucleotide
atacatggcctccctcagggcc

SEQ ID NO: 10407 - DNA, 22 bp, Artificial Sequence
  Description of Artificial Sequence: Synthetic oligonucleotide
ataatctcacagtgtcgctgca

SEQ ID NO: 10408 - DNA, 22 bp, Artificial Sequence
  Description of Artificial Sequence: Synthetic oligonucleotide
tttggaataggcaatgacaggt

SEQ ID NO: 10409 - DNA, 22 bp, Artificial Sequence
  Description of Artificial Sequence: Synthetic oligonucleotide
aatatagtccgcatttccaggc

SEQ ID NO: 10410 - protein, 4 aa, Artificial Sequence
  Description of Artificial Sequence: Synthetic peptide
  MOD_RES (4)..(4): Asp or His
DEAX

53. A method for selectively inhibiting growth or survival of a cancer cell bearing an activating Ras mutation in an individual, the method comprising:
a. determining whether cancer cells of said individual bear an activating Ras mutation; and, if so,
b. contacting said cancer cell with an inhibitor that targets a regulator of a cellular process or a cellular component selected from the group consisting of mitosis and chromosomal segregation, proteasomes, COPS signalosome, protein translation, ubiquitination, protein neddylation, sumoylation, and RNA splicing,
wherein the regulator is a gene product selected from the group consisting of cyclin A2 (CCNA2), hMIS18α, hMIS18β, (C21ORF45, OIP5), borealin (CDCA89), KNL-1 (CASC5), MCAK (KIF2C), subunits of the APC/C complex (ANAPC1, ANAPC4, CDC16, CDC27), SMC4, PIK-1, PSMA5, PSMB5, PSMB6, BUB1, CAND1, CLDN1, COPS3, F8, FABP3, FBXO3, HGS, JAKE KCNA3, LMTK3, MAP4K4, MAPK1, MYST3, PI4K2B, PKN1, PPP1R10, PRKCB1, PTPRE, RAD51C, RAFT, RNF20, SENP1, SENP8, SP100, TDRD3, TERF1, TRIM54, UCKL1, XPO1, BXDC2, FBL, NOL5A, EIF3S8, EIF3S4, GSPT1, HNRNPC, METAP1, COPS4, COPSE, NEDD8, NAE1/APPBP1, SAE1, UBA2, UBE21, FIP1L1, NXF1, USP39, DHX8, and THOC1.
wherein said inhibitor reduces growth or survival of said cancer cell by disrupting mitosis in said cancer cell and
wherein said inhibitor is selectively toxic to said cancer cell as compared to a normal cell.

54. The method of claim 53, wherein said inhibitor is selected from the group consisting of an RNA interference molecule, a small molecule, an antibody, an aptamer and a nucleic acid.

55. The method of claim 53, said contacting steps comprises treating said cancer cell with an inhibitor of a plurality of said genes.

56. The method of claim 53, further comprising contacting with a chemotherapeutic agent for combination therapy.

57. The method of claim 53, wherein said inhibitor is a small molecule selected from the group consisting of paclitaxel, nocodazole, monastrol, BI2536, MG132, or bortezomib.

58. A method for treating cancer in an individual, the method comprising:
c. determining whether cancer cells of said individual bear an activating Ras mutation; and, if so,
d. administering to said individual an inhibitor that targets a regulator of a cellular process or a cellular component selected from the group consisting of mitosis and chromosomal segregation, proteasomes, COPS signalosome, protein translation, ubiquitination, protein neddylation, sumoylation, and RNA splicing,
wherein the regulator is a gene product selected from the group consisting of cyclin A2 (CCNA2), hMIS18a, hMIS18β, (C21ORF45, OIP5), borealin (CDCA89), KNL-1 (CASC5), MCAK (KIF2C), subunits of the APC/C complex (ANAPC1, ANAPC4, CDC16, CDC27), SMC4, PIK-1, PSMA5, PSMB5, PSMB6, BUB1, CAND1, CLDN1, COPS3, F8, FABP3, FBXO3, HGS, JAKE KCNA3, LMTK3, MAP4K4, MAPK1, MYST3, PI4K2B, PKN1, PPP1R10, PRKCB1, PTPRE, RAD51C, RAFT, RNF20, SENP1, SENP8, SP100, TDRD3, TERF1, TRIM54, UCKL1, XPO1, BXDC2, FBL, NOL5A, EIF3S8, EIF3S4, GSPT1, HNRNPC, METAP1, COPS4, COPSE, NEDD8, NAE1/APPBP1, SAE1, UBA2, UBE2I, FIP1L1, NXF1, USP39, DHX8, and THOC1.
wherein said inhibitor reduces growth or survival of said cancer cell by disrupting mitosis in said cancer cell and
wherein said inhibitor is selectively toxic to said cancer cell as compared to a normal cell.

59. The method of claim 58, wherein said inhibitor is selected from the group consisting of an RNA interference molecule, a small molecule, an antibody, an aptamer and a nucleic acid.

60. The method of claim 58, said contacting steps comprises treating said cancer cell with an inhibitor of a plurality of said genes.

61. The method of claim 58, further comprising contacting with a chemotherapeutic agent for combination therapy.

62. The method of claim 58, wherein said inhibitor is a small molecule selected from the group consisting of paclitaxel, nocodazole, monastrol, BI 2536, MG132, or bortezomib.

63. A method for determining prognosis in an individual having an activating Ras mutation, the method comprising:
a. measuring the levels of COPS3, Cdc16, and EV15 in a test sample from an individual having an activating Ras mutation; and
b. comparing the levels of COPS3, Cdc16 and EV15 to the levels of COPS3, Cdc16, and EV 15 in a reference sample,
wherein a decreased level of COPS3, a decreased level of Cdc16 and an increased level of EV15 compared to said reference sample indicates a positive prognosis, and
wherein a larger degree of change indicates a more positive prognosis.

64. The method of claim 63, wherein said test sample is a biopsy sample.

65. The method of claim 63, wherein said reference sample is obtained from said individual.

66. The method of claim 63, wherein said reference sample is obtained from said individual prior to onset of a detectable cancer.

67. The method of claim 63, wherein said reference sample is obtained from a non-cancerous tissue.

68. The method of claim 63, wherein said reference sample is obtained from a population of individuals.
